(19) United States
(12) Patent Application Publication
(10) Pub. No.: US 2024/0400633 A1
(43) Pub. Date: Dec. 5, 2024

(54) SPLIT HUMAN IFN-GAMMA AND TNF-ALPHA CONSTRUCTS AND USES THEREOF

(71) Applicants: Orionis Biosciences, Inc., Waltham, MA (US); Orionis Biosciences BV, Ghent (BE)

(72) Inventors: Nikolai KLEY, Waltham, MA (US); Erik DEPLA, Ghent (BE); Lennart ZABEAU, Ghent (BE)

(21) Appl. No.: 18/696,738

(22) PCT Filed: Sep. 30, 2022
(86) PCT No.: PCT/US2022/077336

§ 371 Date: Mar. 28, 2024

Related U.S. Application Data
(60) Provisional application No. 63/250,425, filed on Sep. 30, 2021.

(51) Int. Cl. C07K 14/57; A61K 38/00; C07K 14/525

(52) U.S. Cl. CPC C07K 14/57; C07K 14/525; A61K 38/00; C07K 2319/30

(57) ABSTRACT

The present invention relates, in part, to Fc-based chimeric protein complexes that include one or more multimeric wild type or modified human IFNγ or human TNFα signaling agents or multimeric targeting moieties and their use as therapeutic agents. The present invention further relates to pharmaceutical compositions comprising the Fc-based chimeric protein complexes that include one or more multimeric wild type or modified human IFNγ or human TNFα signaling agents or multimeric targeting moieties and their use in the treatment of various diseases.

### CROSS-REFERENCE TO RELATED APPLICATIONS

[0001] This application claims the benefit of U.S. Provisional Patent Application No. 63/250,425, filed Sep. 30, 2021, the entire contents of which are hereby incorporated by reference in their entirety.

### FIELD

[0002] The present invention relates, in part, to fragment crystallizable region (Fc)-based chimeric protein complexes and their use as therapeutic agents.

### SEQUENCE LISTING

[0003] The contents of the computer readable Sequence Listing in XML format (“XML Document”) submitted electronically herewith are incorporated herein by reference in their entirety. A computer readable format copy of the Sequence Listing (filename: ORN-084PC.xml, date produced: Sep. 29, 2022; size: 2,037,407 bytes) is submitted per 37 C.F.R. §§ 1.831-1.835.

### BACKGROUND

[0004] Effector function-encoding biologics represent a class of biologics with many potential therapeutic applications. In order for such agents to be useful for the treatment of disease, maximizing their tolerability and therapeutic index is of critical importance, in particular when encoding potent effector functions (e.g., cytokines, many of which are systemically toxic if administered to humans as such). Thus, there is a need for engineering such agents with high inherent safety profile, which requires targeted delivery of an effector function to select target site(s) (e.g. antigen on a cell type of interest) with high precision, and in a regulated fashion.

[0005] An example of such agents, is a chimeric protein having a signaling agent, connected to a targeting element, in which the signaling agent is wild type or modified (e.g. by mutation) to cause an attenuation of the signaling agent's activity (e.g., substantially reducing its ability to interact with/engage its receptor) in a manner such that its effector function can be recovered upon binding of the targeting element to its target (e.g., antigen on target cell).

[0006] However, if the signaling agent or the targeting agent is multimeric then it can be difficult to achieve proper binding to its receptor/ligand without first assembling/reconstituting the agent into its proper multimeric state. Monomers of the multimeric agent (signaling agent or targeting element) may be chemically linked to each other or expressed as a single chain or concatenated chain in an attempt to achieve proper conformation for binding. Such methods, however, may affect function of the agent and have undesirable consequences (e.g. in regard to manufacturing). Thus, there is a need in the art where such desirable multimeric state of the biologic/agent can be achieved while maintaining the efficacy, tolerability, and therapeutic index of the biologic. Further, there is a need for effector function-encoding biologics that are amenable to production and use as a therapy to the treatment or prevention of disease.

### SUMMARY

[0007] The present technology provides fragment crystallizable region (Fc)-based chimeric protein complexes that include one or more multimeric wild type or modified human IFNγ or human TNFα signaling agents or multimeric targeting moieties. These Fc based chimeric protein complexes include two Fc chains and each Fc chain includes, e.g., one or more monomers of the multimeric wild type or modified human IFNγ or human TNFα signaling agent or targeting moiety such that when the Fc chains assemble they lead to reconstitution of the multimeric wild type or modified human IFNγ or human TNFα signaling agent or targeting moiety that is functional upon reconstitution. Accordingly, the present technology allows for the assembly of a functional wild type or modified human IFNγ or human TNFα signaling agent or targeting moiety from a “split” cytokine. These complexes include biological therapeutic agents whose effector function can be delivered in a highly precise fashion to a target of choice and without, or with a mitigated amount of systemic adverse events, thereby limiting systemic cross-reactivities and associated adverse events, while also providing features that impart pharmaceutical properties enabling the production of therapeutic agents with, for example, desired in vivo exposure time (e.g. half-life), size (e.g. for biodistribution and clearance characteristics), as well as large scale production and/or purification for commercial production (e.g. having adequate solubility, purity, stability and storage properties).

[0008] In some aspects, the present technology relates to a Fc-based chimeric protein complex including (a) a wild type or modified human IFNγ or human TNFα signaling agent that is functional as a multimer of monomers, (b) an Fc domain comprising two Fc chains, the two Fc chains each comprising one or more wild type or modified human IFNγ or human TNFα signaling agent monomers such that the functional multimer of monomers is reconstituted upon association of the two Fc chains, wherein the Fc domain optionally has one or more mutations that reduce or eliminate one or more effector functions of the Fc domain, promotes Fc chain pairing of the Fc domain, and/or stabilizes a hinge region in the Fc domain; and (c) a targeting moiety comprising a recognition domain that recognizes and/or binds to a target. The signaling agent can be a wild-type human IFNγ or human TNFα signaling agent or a modified human IFNγ or human TNFα signaling agent that has one or more mutations that confer improved safety relative to the wild type human IFNγ or human TNFα signaling agent. The modified human IFNγ or human TNFα signaling agent is, in some embodiments, a mutant of the human IFNγ or human TNFα signaling agent.

[0009] In other aspects, the Fc-based chimeric protein complex includes (a) a targeting moiety comprising a recognition domain that recognizes or binds to a target, wherein the targeting moiety is functional as a multimer of monomers; (b) an Fc domain comprising two Fc chains, the two Fc chains each comprising one or more targeting moiety's monomers such that the functional multimer of monomers is reconstituted upon association of the two Fc chains, wherein the Fc domain optionally has one or more mutations that reduce or eliminate one or more effector functions of the Fc domain, promotes Fc chain pairing of the Fc domain, and/or stabilizes a hinge region in the Fc domain; and (c) a human IFNγ or human TNFα signaling agent wherein human IFNγ or human TNFα signaling agent is a wild-type human IFNγ or human TNFα signaling agent or a modified human IFNγ or human TNFα signaling agent that has one or more mutations that confer improved safety relative to the wild type human IFNγ or human TNFα signaling agent.

[0010] In some embodiments, the Fc-based chimeric protein complex includes one or more linkers. In some embodiments, the Fc-based chimeric protein complex includes a dimeric human IFNγ or human TNFα signaling agent and each of its monomer is linked to a different Fc chain. In some embodiments, the Fc-based chimeric protein complex includes a trimeric human IFNγ or human TNFα signaling agent and two of its monomers are linked to the first Fc chain and one of its monomer is linked to a first Fc chain.

[0011] In some embodiments, the Fc domain has one or more mutations that reduce or eliminate an effector function of the Fc domain, promote Fc chain pairing of the Fc domain, and/or stabilize a hinge region in the Fc domain. In some embodiments, the one or more Fc chains of the Fc domain have one or more mutations that reduce or eliminate an effector function of the Fc domain, promote Fc chain pairing of the Fc domain, and/or stabilize a hinge region in the Fc domain.

[0012] In some embodiments, such Fc-based chimeric protein complexes are heterodimeric. In some embodiments, the Fc-based chimeric protein complexes are heterodimeric and the targeting moiety and the human IFNγ or human TNFα signaling agent are oriented in trans. In some embodiments, the Fc-based chimeric protein complexes are heterodimeric and pairing is via Ridgway knob-in-hole construction (as described herein). In some embodiments, the Fc-based chimeric protein complexes are heterodimeric and pairing is via Merchant knob-in-hole construction (as described herein).

[0013] In some embodiments, such Fc-based chimeric protein complexes are homodimeric.

[0014] In some embodiments, the one or more mutations in the modified human IFNγ or human TNFα signaling agent reduces the affinity or activity at the human IFNγ or human TNFα signaling agent's receptor relative to a wild type human IFNγ or human TNFα signaling agent. In some embodiments, the targeting moiety restores the affinity or activity of the modified human IFNγ or human TNFα signaling agent. In some embodiments, the targeting moiety restores the activity or affinity of at least one monomer of the multimeric human IFNγ or human TNFα signaling agent at the human IFNγ or human TNFα signaling agent's receptor. In some embodiments, the targeting moiety restores the activity or affinity of all monomers of the multimeric human IFNγ or human TNFα signaling agent.

[0015] In some embodiments, the agonistic or antagonistic activity of the human IFNγ or human TNFα signaling agent is attenuated. In some embodiments, at least one of the monomers of the multimeric targeting moiety or the human IFNγ or human TNFα signaling agent is modified. In other embodiments, all of the monomers of the multimeric targeting moiety or the human IFNγ or human TNFα signaling agent are modified.

[0016] In some embodiments, the Fc-based chimeric protein complexes comprise one or more additional targeting moieties and/or wild type or modified human IFNγ or human TNFα signaling agents. In some embodiments, the additional targeting moiety is multimeric, and in other embodiments, the additional human IFNγ or human TNFα signaling agent is multimeric. In some embodiments, the additional multimeric targeting moiety's monomers are such that a functional multimer of monomers is reconstituted upon association of the two Fc chains. In some embodiments, the additional multimeric human IFNγ or human TNFα signaling agent's monomers are such that a functional multimer of monomers is reconstituted upon association of the two Fc chains.

[0017] In some embodiments, the Fc-based chimeric protein complexes are multispecific. In some embodiments, the targeting moieties are a single domain antibody (VHH) or a natural ligand for a receptor.

[0018] In another aspect, the present technology relates to the use of Fc-based chimeric protein complexes to treat or prevent various diseases and disorders. In some embodiments, the Fc-based chimeric protein complexes are used to treat cancer, infections, metabolic diseases, (neuro)degenerative diseases, and cardiovascular diseases and immune disorders.

### BRIEF DESCRIPTION OF THE DRAWINGS

[0019] FIGS. 1-7A-F show various non-limiting illustrative schematics of the Fc-based chimeric protein complexes of the present invention. In embodiments, each schematic is a composition of the present invention. Where applicable in the figures, “TM” refers to a “targeting moiety” as described herein, “SA” refers to a “human IFNγ or human TNFα signaling agent” as described herein, “ [symbol] ” is an optional “linker” as described herein, the two long parallel rectangles are human Fc domains, having one or more Fc chains, e.g. from IgG1, from IgG2, or from IgG4, as described herein and optionally with effector knock-out and/or stabilization mutations as also described herein, and the two long parallel rectangles with one having a protrusion and the other having an indentation are human Fc domains, having one or more Fc chains, e.g. from IgG1, from IgG2, or from IgG4 as described herein, with knob-in-hole and/or ionic pair (a/k/a charged pairs, ionic bond, or charged residue pair) mutations as described herein and optionally with effector knock-out and/or stabilization mutations as also described herein.

[0020] FIG. 1 shows non-limiting building blocks of AcTakines, including target molecule (TM), human IFNγ or human TNFα signaling agent (SA), linker, human Fc for bivalent constructs, and human Fc for bispecific constructs.

[0021] FIG. 2 depicts a non-limiting scheme of AcTakines having a single chain in which two copies of the cytokines (human IFNγ or human TNFα agents) for dimeric cytokines are present on the same Fc-chain of an Fc-based AcTakine by directly linking to each other or linking to each other with a linker.

[0022] FIGS. 3A-J depict non-limiting schemes of AcTakine of a split dimeric human IFNγ or human TNFα signaling agent, in which both monomers of the cytokines (human IFNγ or human TNFα signaling agents) are present on each of the Fc-chain, and a target molecule is present on the knob side of the knobs-into-holes of the Fc-chain of an Fc-based AcTakine. The knobs-into-holes may be replaced or supplemented with ion charge pair mutations.

[0023] FIGS. 4A-J depict non-limiting schemes of AcTakine of split dimeric human IFNγ or human TNFα signaling agent, in which both monomers of the cytokines (human IFNγ or human TNFα signaling agents) are present on each of the Fc-chain, and a target molecule is present on the hole side of the knobs-into-holes of the Fc-chain of an Fc-based AcTakine. The knobs-into-holes may be replaced or supplemented with ion charge pair mutations.

[0024] FIG. 5 depicts a non-limiting scheme of AcTakines trimeric cytokines as a single chain variant in which three copies of the cytokines (human IFNγ or human TNFα signaling agents) are directly linked to each other or linked to each other with a linker.

[0025] FIGS. 6A-F depict non-limiting schemes of AcTakines of split trimeric human IFNγ or human TNFα signaling agent, in which a monomer of the cytokine (human IFNγ or human TNFα signaling agent) on the first Fc-chain of an Fc-based AcTakine and a dimer of the cytokines (human IFNγ or human TNFα signaling agents) on the second Fc-chain of an Fc-based AcTakine, and a target molecule is present on the knob side of the knobs-into-holes of the Fc-chain. The knobs-into-holes may be replaced or supplemented with ion charge pair mutations.

[0026] FIGS. 7A-F depict non-limiting schemes of AcTakines of split trimeric human IFNγ or human TNFα signaling agent, in which a monomer of the cytokine (target molecule) on the first Fc-chain of an Fc-based AcTakine and a dimer of the cytokines (target molecules) on the second Fc-chain of an Fc-based AcTakine, and a target molecule is present on the hole side of the knobs-into-holes of the Fc-chain. The knobs-into-holes may be replaced or supplemented with ion charge pair mutations

[0027] FIGS. 8A and 8B show biological activity of IFNg Fc AFN on transient transfected Hek293T cells. MOCK or Clec9A transfected Hek293T cells were stimulated overnight with a serial dilution of wild type IFNg or IFNg Fc AFN. Average luciferase values (±STDEV) of triplicate measurements are plotted.

[0028] FIGS. 9A-C show that IFNg_delta 16 was cloned at C-terminal of both Fc arms resulting in an Actaferon (AFN) with Average luciferase values (±STDEV) of triplicate measurements are plotted.

### DETAILED DESCRIPTION

[0029] The present technology is based, in part, on the discovery of an approach to generating a multimeric human IFNγ or human TNFα signaling agent, that are optionally modified to have reduced affinity or activity for one or more of its receptors, and/or targeting moieties that recognize and bind to a specific target by reconstitution of monomer and/or dimers via Fc-based coupling. Accordingly, in various embodiments, the present technology permits the formation of a multimeric state of a cytokine that is functional, from momoner or dimer subunits of the cytokine.

[0030] In some aspects, the present invention is related to an Fc-based chimeric protein complex that includes (a) a human IFNγ or human TNFα signaling agent which is functional as a multimer of monomers, wherein the human IFNγ or human TNFα signaling agent is a wild-type human IFNγ or human TNFα signaling agent or a modified human IFNγ or human TNFα signaling agent that has one or more mutations that confer improved safety relative to the wild type human IFNγ or human TNFα signaling agent; (b) an Fc domain comprising two Fc chains, the two Fc chains each comprising one or more human IFNγ or human TNFα signaling agent monomers such that the functional multimer of monomers is reconstituted upon association of the two Fc chains, wherein the Fc domain optionally has one or more mutations that reduce or eliminate one or more effector functions of the Fc domain, promotes Fc chain pairing of the Fc domain, and/or stabilizes a hinge region in the Fc domain; and (c) a targeting moiety comprising a recognition domain that recognizes and/or binds to a target.

[0031] In other aspects, the present invention is related to an Fc-based chimeric protein complex that includes (a) a targeting moiety comprising a recognition domain that recognizes or binds to a target, wherein the targeting moiety is functional as a multimer of monomers; (b) an Fc domain comprising two Fc chains, the two Fc chains each comprising one or more targeting moiety's monomers such that the functional multimer of monomers is reconstituted upon association of the two Fc chains, wherein the Fc domain optionally has one or more mutations that reduce or eliminate one or more effector functions of the Fc domain, promotes Fc chain pairing of the Fc domain, and/or stabilizes a hinge region in the Fc domain; and (c) a human IFNγ or human TNFα signaling agent wherein the human IFNγ or human TNFα signaling agent is a wild-type human IFNγ or human TNFα signaling agent or a modified human IFNγ or human TNFα signaling agent that has one or more mutations that confer improved safety relative to the wild type human IFNγ or human TNFα signaling agent.

[0032] In some embodiments, such Fc-based chimeric protein complexes, surprisingly, have dramatically improved half-lives in vivo, as compared to chimeras lacking an Fc and, especially in the heterodimer configuration as described herein, are particularly amendable to production, purification, and pharmaceutical formulation due to enhanced solubility, stability and other drug-like properties. Accordingly, the present Fc-based chimeric protein complex engineering approach yields agents that are particularly suited for use as therapies.

[0033] In some embodiments, these Fc-based chimeric protein complexes may bind and directly or indirectly recruit immune cells to sites in need of therapeutic action (e.g. a tumor or tumor microenvironment). In some embodiments, the Fc-based chimeric protein complexes enhance tumor antigen presentation for elicitation of effective antitumor immune response. In some embodiments these Fc-based chimeric protein complexes may bind tumor cells, tumor microenvironment-associated cells or stromal targets. In some embodiments. These Fc-based chimeric protein complexes may bind to tissue-specific and/or cell-specific specific markers (e.g. antigens, targets) associated with disease-affected or disease-associated organs, tissues and cells. In some embodiments these Fc-based chimeric protein complexes may bind to more than one target/protein marker/antigen present on the same or different cells. In some embodiments these Fc-based chimeric protein complexes may bind to two or more cell types. In some embodiments these Fc-based chimeric protein complexes may bind to more than one cell type and promote formation of a cell complex (e.g. an immune cell and a tumor cell).

[0034] In some embodiments, the Fc-based chimeric protein complexes modulate antigen presentation. In some embodiments, the Fc-based chimeric protein complexes temper the immune response to avoid or reduce autoimmunity. In some embodiments, the Fc-based chimeric protein complexes provide immunosuppression. In some embodiments, the Fc-based chimeric protein complexes cause an increase a ratio of Tregs to CD8+ T cells and/or CD4+ T cells in a patient. In some embodiments, the present methods relate to reduction of auto-reactive T cells in a patient.

[0035] In some embodiments, the Fc-based chimeric protein complexes are a complex of proteins formed, for example, by disulfide bonding and/or ionic pairing. In embodiments, the complex of proteins includes one or more fusion proteins. In some embodiments, the Fc-based chimeric protein complex has a configuration and/or orientation/configuration as shown in any one of FIGS. 3A-J, 4A-J, 5, 6A-F, and 7A-F. In some embodiments, the Fc-based chimeric protein complex has a configuration and/or orientation/configuration as shown in FIG. 3A, 4A, 6A, or 7A.

[0036] The present technology provides pharmaceutical compositions comprising the Fc-based chimeric protein complexes and their use in the treatment of various diseases, including, e.g., cancer, autoimmune, neurodegenerative diseases, metabolic diseases, cardiovascular diseases and degenerative diseases.

### Fc Domains

[0037] The fragment crystallizable domain (Fc domain) is the tail region of an antibody that interacts with Fc receptors located on the cell surface of cells that are involved in the immune system, e.g., B lymphocytes, dendritic cells, natural killer cells, macrophages, neutrophils, eosinophils, basophils, and mast cells. In embodiments, the Fc domain includes two Fc chains, at least one of which comprises a monomer of the multimeric human IFNγ or human TNFα signaling agents or multimeric targeting moiety of the present invention. In some embodiments, the Fc domain includes two Fc chains where each comprises one or more of targeting moiety's monomers such that the multimeric targeting moiety (which includes the monomers) is reconstituted upon association of the two Fc chains. In other embodiments, the Fc domain includes two Fc chains where each comprises one or more of human IFNγ or human TNFα signaling agent's monomers such that the multimeric human IFNγ or human TNFα signaling agent (which includes the monomers) is reconstituted upon association of the two Fc chains. In one embodiment, the Fc domain includes two Fc chain where the first Fc chain includes a first monomer of the human IFNγ or human TNFα signaling agent or the targeting moiety and the second Fc chain includes a second monomer of the human IFNγ or human TNFα signaling agent or the targeting moiety and the first and the second Fc chain—upon association—cause reconstitution of the multimeric human IFNγ or human TNFα signaling agent or the targeting moiety. Such reconstitution of the multimeric human IFNγ or human TNFα signaling agent or the targeting moiety, in some embodiments, causes the human IFNγ or human TNFα signaling agent or the targeting moiety to function.

[0038] The present invention also includes Fc domains where the Fc chain includes multiple multimeric human IFNγ or human TNFα signaling agents or multiple multimeric targeting moieties or any combination thereof. For instance, in one embodiment, the Fc domain includes two multimeric human IFNγ or human TNFα signaling agent and one targeting agent where the Fc chains are configured such that, upon association, the Fc chains cause reconstitution of the two functional multimeric human IFNγ or human TNFα signaling agents. In another example, the Fc domain includes two multimeric targeting moieties and one human IFNγ or human TNFα signaling agent, where the Fc chains are configured such that, upon association, the Fc chains cause reconstitution of the two functional multimeric targeting moieties. In some embodiments, the Fc domain is configured such that the multimeric human IFNγ or human TNFα signaling agent or the multimeric targeting moiety is not functional or exhibits reduced function unless the Fc chains are associated can cause reconstitution of the multimeric human IFNγ or human TNFα signaling agent or the multimeric targeting moiety.

[0039] In IgG, IgA and IgD antibody isotypes, the Fc domain is composed of two identical protein chains, derived from the second and third constant domains of the antibody's two heavy chains. In IgM and IgE antibody isotypes, the Fc domain contains three heavy chain constant domains (C_{H} domains 2-4) in each polypeptide chain.

[0040] In some embodiments, the Fc-based chimeric protein complex of the present technology include(s) chimeric proteins with Fc domains that promotes formation of such protein complexes. In some embodiments, the Fc domains are from selected from IgG, IgA, IgD, IgM, or IgE. In some embodiments, the Fc domains are from selected from IgG1, IgG2, IgG3, or IgG4.

[0041] In some embodiments, the Fc domains are from selected from human IgG, IgA, IgD, IgM, or IgE. In some embodiments, the Fc domains are from selected from human IgG1, IgG2, IgG3, or IgG4.

[0042] In some embodiments, the Fc domains of the Fc-based chimeric protein complex comprise the CH2 and CH3 regions of IgG. In some embodiments, the IgG is human IgG. In some embodiments, the human IgG is selected from IgG1, IgG2, IgG3, or IgG4.

[0043] In some embodiments, the Fc domains comprise one or more mutations. In some embodiments, the mutation(s) to the Fc domains reduces or eliminates the effector function the Fc domains. In some embodiments, the mutated Fc domain has reduced affinity or binding to a target receptor. By way of example, in some embodiments, the mutation to the Fc domains reduces or eliminates the binding of the Fc domains to FcγR. In some embodiments, the FcγR is selected from FcγRI; FcγRIIa, 131 R/R; FcγRIIa, 131 H/H, FcγRIIb; and FcγRIII. In some embodiments, the mutation to the Fc domains reduces or eliminated binding to complement proteins, such as, e.g., C1q. In some embodiments, the mutation to the Fc domains reduces or eliminated binding to both FcγR and complement proteins, such as, e.g., C1q.

[0044] In some embodiments, the Fc domains comprise the LALA mutation to reduce or eliminate the effector function of the Fc domains. By way of example, in some embodiments, the LALA mutation comprises L234A and L235A substitutions in human IgG (e.g., IgG1) (wherein the numbering is based on the commonly used numbering of the CH2 residues for human IgG1 according to EU convention (PNAS, Edelman et al., 1969; 63 (1) 78-85)).

[0045] In some embodiments, the Fc domains of human IgG comprise a mutation at one or more of L234, L235, K322, D265, P329, and P331 to reduce or eliminate the effector function of the Fc domains. By way of example, in some embodiments, the mutations are selected from L234A, L234F, L235A, L235E, L235Q, K322A, K322Q, D265A, P329G, P329A, P331G, and P331S.

[0046] In some embodiments, the Fc domains comprise the FALA mutation to reduce or eliminate the effector function of the Fc domains. By way of example, in some embodiments, the FALA mutation comprises F234A and L235A substitutions in human IgG4.

[0047] In some embodiments, the Fc domains of human IgG4 comprise a mutation at one or more of F234, L235, K322, D265, and P329 to reduce or eliminate the effector function of the Fc domains. By way of example, in some embodiments, the mutations are selected from F234A, L235A, 1L235E, L235Q, K322A, K322Q, D265A, P329G, and P329A.

[0048] In some embodiments, the mutation(s) to the Fc domain stabilize a hinge region in the Fc domain. By way of example, in some embodiments, the Fc domain comprises a mutation at S228 of human IgG to stabilize a hinge region. In some embodiments, the mutation is S228P.

[0049] In some embodiments, the mutation(s) to the Fc domain promote chain pairing in the Fc domain. In some embodiments, chain pairing is promoted by ionic pairing (a/k/a charged pairs, ionic bond, or charged residue pair).

[0050] In some embodiments, the Fc domain comprises a mutation at one more of the following amino acid residues of IgG to promote of ionic pairing: D356, E357, L368, K370, K392, D399, and K409.

[0051] By way of example, in some embodiments, the human IgG Fc domain comprise one of the mutation combinations in Table 1 to promote of ionic pairing.

TABLE 1

| Substitution(s) on one Fc Chain | Substitution(s) on other Fc Chain |
|---|---|
| D356K D399K | K392D K409D |
| E357R L368R | K370D K409D |
| E357R L368K | K370D K409D |
| E357R D399K | K370D K409D |
| E357R | K370D |
| L368R D399K | K392D K409D |
| L368K D399K | K392D K409D |
| L368R D399K | K409D |
| L368K D399K | K409D |
| L368R | K409D |
| L368K | K409D |
| K370D K409D | E357R D399K |
| K370D K409D | E357R L368R |
| K370D K409D | E357R L368K |
| K370D K409D | E357R D399K |
| K370D K409D | E357R L368R |
| K370D K409D | E357R L368K |
| K370D | E357R |
| K370D | E357R |
| K392D K409D | D356K D399K |
| K392D K409D | L368R D399K |
| K392D K409D | L368K D399K |
| K392D K409D | D399K |
| D399K | K392D K409D |
| D399K | K409D |
| K409D | L368R |
| K409D | L368K |
| K409D | L368R D399K |
| K409D | L368K D399K |
| K409D | L368R |
| K409D | L368K |
| K409D | L368R D399K |
| K409D | L368K D399K |
| K409D | D399K |

[0052] In some embodiments, chain pairing of the individual Fc-domains in a chimeric protein complex is promoted by knob-in-hole mutations. In some embodiments, the Fc domain comprises one or more mutations to allow for a knob-in-hole interaction in the Fc domain. In some embodiments, a first Fc chain is engineered to express the “knob” and a second Fc chain is engineered to express the complementary “hole.” By way of example, in some embodiments, human IgG Fc domain comprises the mutations of Table 2 to allow for a knob-in-hole interaction.

TABLE 2

| Substitution(s) on one Fc Chain | Substitution(s) on other Fc Chain |
|---|---|
| T366Y | Y407T |
| T366Y/F405A | T394W/Y407T |
| T366W | Y407A |
| T366W | Y407V |
| T366Y | Y407A |
| T366Y | Y407V |
| T366Y | Y407T |

[0053] In some embodiments, the Fc domains in the Fc-based chimeric protein complexes of the present technology comprise any combination of the above-disclosed mutations. By way of example, in some embodiments, the Fc domain comprises mutations that promote ionic pairing and/or a knob-in-hole interaction. By way of example, in some embodiments, the Fc domain comprises mutations that have one or more of the following properties: promote ionic pairing, induce a knob-in-hole interaction, reduce or eliminate the effector function of the Fc domain, and cause Fc stabilization (e.g. at hinge).

[0054] By way of example, in some embodiments, a human IgG Fc domain comprise mutations disclosed in Table 3, which promote ionic pairing and/or promote a knob-in-hole interaction in the Fc domain.

TABLE 3

| Substitution(s) on one Fc Chain | Substitution(s) on other Fc Chain |
|---|---|
| T366W K370D | E357R Y407A |
| T366W K370D | E357R Y407V |
| T366W K409D | L368R Y407A |
| T366W K409D | L368R Y407V |
| T366W K409D | L368K Y407A |
| T366W K409D | L368K Y407V |
| T366W K409D | L368R D399K Y407A |
| T366W K409D | L368R D399K Y407V |
| T366W K409D | L368K D399K Y407A |
| T366W K409D | L368K D399K Y407V |
| T366W K409D | D399K Y407A |
| T366W K409D | D399K Y407V |
| T366W K392D K409D | D399K Y407A |
| T366W K392D K409D | D399K Y407V |
| T366W K392D K409D | D356K D399K Y407A |
| T366W K392D K409D | D356K D399K Y407V |
| T366W K370D K409D | E357R D399K Y407A |
| T366W K370D K409D | E357R D399K Y407V |
| T366W K370D K409D | E357R L368R Y407A |
| T366W K370D K409D | E357R L368R Y407V |
| T366W K370D K409D | E357R L368K Y407A |
| T366W K370D K409D | E357R L368K Y407V |
| T366W K392D K409D | L368R D399K Y407A |
| T366W K392D K409D | L368R D399K Y407V |
| T366W K392D K409D | L368K D399K Y407A |
| T366W K392D K409D | L368K D399K Y407V |
| E357R T366W | K370D Y407A |
| E357R T366W | K370D Y407V |
| T366W L368R | Y407A K409D |
| T366W L368R | Y407V K409D |
| T366W L368K | Y407A K409D |
| T366W L368K | Y407V K409D |
| T366W L368R D399K | Y407A K409D |
| T366W L368R D399K | Y407V K409D |
| T366W L368K D399K | Y407A K409D |
| T366W L368K D399K | Y407V K409D |
| T366W D399K | Y407A K409D |
| T366W D399K | Y407V K409D |
| 1366W D399K | K392D Y407A K409D |
| T366W D399K | K392D Y407V K409D |
| T366W D356K D399K | K392D Y407A K409D |
| T366W D356K D399K | K392D Y407V K409D |
| E357R T366W D399K | K370D Y407A K409D |
| E357R T366W D399K | K370D Y407V K409D |
| E357R T366W L368R | K370D Y407A K409D |
| E357R T366W L368R | K370D Y407V K409D |
| E357R T366W L368K | K370D Y407A K409D |
| E357R T366W L368K | K370D Y407V K409D |
| T366W L368R D399K | K392D Y407A K409D |
| T366W L368R D399K | K392D Y407V K409D |
| T366W L368K D399K | K392D Y407A K409D |

[0055] By way of example, in some embodiments, human IgG Fc domains comprise mutations disclosed in Table 4, which promote ionic pairing, promote a knob-in-hole interaction, or a combination thereof ofs the Fc domains. In embodiments, the “Chain 1” and “Chain 2” of Table 4 can be interchanged (e.g. Chain 1 can have Y407T and Chain 2 can have T366Y).

TABLE 4

| Chain 1 mutation | Chain 2 mutation | Reference | IgG |
|---|---|---|---|
| T366Y | Y407T | Ridgway et al., 1996 Protein | IgG1 |
| | | Engineering, Design and Selection, | |
| | | Volume 9, Issue 7, 1 Jul. 1996, Pages | |
| | | 617-62 | |
| T366Y/F405A | T394W/Y407T | Ridgway et al., 1996 Protein | IgG1 |
| | | Engineering, Design and Selection, | |
| | | Volume 9, Issue 7, 1 Jul. 1996, Pages | |
| | | 617-62 | |
| T366W | Y407A | Atwell et al., 1997 JMB | IgG1 |
| | | Volume 270, Issue 1, 4 Jul. 1997, | |
| | | Pages 26-35 | |
| T366W | T366S/L368V/Y407A | Atwell et al., 1997 JMB | IgG1 |
| | | Volume 270, Issue 1, 4 Jul. 1997, | |
| | | Pages 26-35 | |
| T366W | L368A/Y407A | Atwell et al., 1997 JMB | IgG1 |
| | | Volume 270, Issue 1, 4 Jul. 1997, | |
| | | Pages 26-35 | |
| T366W | T366S/L368A/Y407A | Atwell et al., 1997 JMB | IgG1 |
| | | Volume 270, Issue 1, 4 Jul. 1997, | |
| | | Pages 26-35 | |
| T366W | T366S/L368G/Y407V | Atwell et al., 1997 JMB | IgG1 |
| | | Volume 270, Issue 1, 4 Jul. 1997, | |
| | | Pages 26-35 | |
| T366W/D399C | T366S/L368A/K392C/Y407V | Merchant et al., 1998 Nature | IgG1 |
| | | Biotechnology volume 16, pages | |
| | | 677-681 (1998) | |
| T366W/K392C | T366S/L368A/D399C/Y407V | Merchant et al., 1998 Nature | IgG1 |
| | | Biotechnology volume 16, pages | |
| | | 677-681 (1998) | |
| S354C/T366W | Y349C/T366S/L368A/Y407V | Merchant et al., 1998 Nature | IgG1 |
| | | Biotechnology volume 16, pages | |
| | | 677-681 (1998) | |
| Y349C/T366W | S354C/T366S/L368A/Y407V | Merchant et al., 1998 Nature | IgG1 |
| | | Biotechnology volume 16, pages | |
| | | 677-681 (1998) | |
| E356C/T366W | Y349C/T366S/L368A/Y407V | Merchant et al., 1998 Nature | IgG1 |
| | | Biotechnology volume 16, pages | |
| | | 677-681 (1998) | |
| Y349C/T366W | E356C/T366S/L368A/Y407V | Merchant et al., 1998 Nature | IgG1 |
| | | Biotechnology volume 16, pages | |
| | | 677-681 (1998) | |
| E357C/T366W | Y349C/T366S/L368A/Y407V | Merchant et al., 1998 Nature | IgG1 |
| | | Biotechnology volume 16, pages | |
| | | 677-681 (1998) | |
| Y349C/T366W | E357C/T366S/L368A/Y407V | Merchant et al., 1998 Nature | IgG1 |
| | | Biotechnology volume 16, pages | |
| | | 677-681 (1998) | |
| D339R | K409E | Gunasekaran et al., 2010 The Journal of | IgG1 |
| | | Biological Chemistry 285, 19637-19646. | |
| D339K | K409E | Gunasekaran et al., 2010 The Journal of | IgG1 |
| | | Biological Chemistry 285, 19637-19646. | |
| D339R | K409D | Gunasekaran et al., 2010 The Journal of | IgG1 |
| | | Biological Chemistry 285, 19637-19646. | |
| D339K | K409D | Gunasekaran et al., 2010 The Journal of | IgG1 |
| | | Biological Chemistry 285, 19637-19646. | |
| D339K | K360D/K409E | Gunasekaran et al., 2010 The Journal of | IgG1 |
| | | Biological Chemistry 285, 19637-19646. | |
| D339K | K392D/K409E | Gunasekaran et al., 2010 The Journal of | IgG1 |
| | | Biological Chemistry 285, 19637-19646. | |
| D339K/E356K | K392D/K409E | Gunasekaran et al., 2010 The Journal of | IgG1 |
| | | Biological Chemistry 285, 19637-19646. | |
| D339K/E357K | K392D/K409E | Gunasekaran et al., 2010 The Journal of | IgG1 |
| | | Biological Chemistry 285, 19637-19646. | |
| D339K/E356K | K409E/K439D | Gunasekaran et al., 2010 The Journal of | IgG1 |
| | | Biological Chemistry 285, 19637-19646. | |
| D339K/E357K | K370D/K409E | Gunasekaran et al., 2010 The Journal of | IgG1 |
| | | Biological Chemistry 285, 19637-19646. | |
| D339K/E356K/E357K | K370D/K392D/K409E | Gunasekaran et al., 2010 The Journal of | IgG1 |
| | | Biological Chemistry 285, 19637-19646. | |
| S364H/F405A | Y349T/T394F | Moore et al., 2011 mAbs, 3: 6, 546-557 | IgG1 |
| S364H/T394F | Y349T/F405A | Moore et al., 2011 mAbs, 3: 6, 546-557 | IgG1 |
| D221R/P228R/K409R | D221E/P228E/L368E | Strop et al., 2012 JMB Volume 420, | IgG1 |
| | | Issue 3, 13 Jul. 2012, Pages 204-219 | |
| C223R/E225R/P228R/K409R | C223E/P228E/L368E | Strop et al., 2012 JMB Volume 420, | IgG2 |
| | | Issue 3, 13 Jul. 2012, Pages 204-219 | |
| F405L | K409R | Labrijn et al., 2013 PNAS Mar. 26, | IgG1 |
| | | 2013. 110 (13) 5145-5150 | |
| F405A/Y407V | T394W | Von Kreudenstein et al., 2013 mAbs | IgG1 |
| | | Volume 5, 2013 - Issue 5, pp. 644-654 | |
| F405A/Y407V | T3661/T394W | Von Kreudenstein et al., 2013 mAbs | IgG1 |
| | | Volume 5, 2013 - Issue 5, pp. 644-654 | |
| F405A/Y407V | T366L/T394W | Von Kreudenstein et al., 2013 mAbs | IgG1 |
| | | Volume 5, 2013 - Issue 5, pp. 644-654 | |
| F405A/Y407V | T366L/K392M/T394W | Von Kreudenstein et al., 2013 mAbs | IgG1 |
| | | Volume 5, 2013 - Issue 5, pp. 644-654 | |
| L351Y/F405A/Y407V | T366L/K392M/T394W | Von Kreudenstein et al., 2013 mAbs | IgG1 |
| | | Volume 5, 2013 - Issue 5, pp. 644-654 | |
| T350V/L351Y/F405A/Y407V | T350V/T366L/K392M/T394W | Von Kreudenstein et al., 2013 mAbs | IgG1 |
| | | Volume 5, 2013 - Issue 5, pp. 644-654 | |
| T350V/L351Y/F405A/Y407V | T350V/T366L/K392L/T394W | Von Kreudenstein et al., 2013 mAbs | IgG1 |
| | | Volume 5, 2013 - Issue 5, pp. 644-654 | |
| K409W | D339V/F405T | Choi et al., 2013 PNAS Jan. 2, | IgG1 |
| | | 2013. 110 (1) 270-275 | |
| K360E | Q347R | Choi et al., 2013 PNAS Jan. 2, | IgG1 |
| | | 2013. 110 (1) 270-275 | |
| K360E/K409W | D339V/Q347R/F405T | Choi et al., 2013 PNAS Jan. 2, | IgG1 |
| | | 2013. 110 (1) 270-275 | |
| Y349C/K360E/K409W | D339V/Q347R/S354C/F405T | Choi et al., 2013 PNAS Jan. 2, | IgG1 |
| | | 2013. 110 (1) 270-275 | |
| K392A/K409D | E356K/D399K | Leaver-Fey et al., 2016 Structure | IgG1 |
| | | Volume 24, Issue 4, 5 Apr. 2016, Pages | |
| | | 641-651 | |
| T366W | T366S/L358A/Y407A | Leaver-Fey et al., 2016 Structure | IgG1 |
| | | Volume 24, Issue 4, 5 Apr. 2016, Pages | |
| | | 641-651 | |
| D339M/Y407A | T336V/K409V | Leaver-Fey et al., 2016 Structure | IgG1 |
| | | Volume 24, Issue 4, 5 Apr. 2016, Pages | |
| | | 641-651 | |
| D339M/K360D/Y407A | T336V/E345R/Q347R/K409V | Leaver-Fey et al., 2016 Structure | IgG1 |
| | | Volume 24, Issue 4, 5 Apr. 2016, Pages | |
| | | 641-651 | |
| Y349S/T366V/K370Y/K409V | E357D/S364Q/Y407A | Leaver-Fey et al., 2016 Structure | IgG1 |
| | | Volume 24, Issue 4, 5 Apr. 2016, Pages | |
| | | 641-651 | |
| Y349S/T366M/K370Y/K409V | E356G/E357D/S364Q/Y407A | Leaver-Fey et al., 2016 Structure | IgG1 |
| | | Volume 24, Issue 4, 5 Apr. 2016, Pages | |
| | | 641-651 | |
| Y349S/T366M/K370Y/K409V | E357D/S364R/Y407A | Leaver-Fey et al., 2016 Structure | IgG1 |
| | | Volume 24, Issue 4, 5 Apr. 2016, Pages | |
| | | 641-651 | |

And any combination as described in Tables 1-3 of US20150284475A1

[0056] By way of example, in some embodiments, a human IgG Fc domains comprise mutations disclosed in Table 5, which reduce or eliminate FcγR and/or complement binding in the Fc domain. In embodiments, the table 5 mutations are in both chains.

TABLE 5

| Chain 1 mutation | Reference | IgG |
|---|---|---|
| L234A/L235A | Alegre et al., 1994 | IgG1 |
| | Transplantation 57: | |
| | 1537-1543 | |
| F234A/L235A | Alegre et al., 1994 | IgG4 |
| | Transplantation 57: | |
| | 1537-1543 | |
| L235E | Morgan et al., 1995 | IgG1 |
| | Immunology. 1995 October; | |
| | 86(2): 319-324. | |
| L235E | Morgan et al., 1995 | IgG4 |
| | Immunology. 1995 October; | |
| | 86(2): 319-324. | |
| L235A | Morgan et al., 1995 | IgG1 |
| | Immunology. 1995 October; | |
| | 86(2): 319-324. | |
| G237A | Morgan et al., 1995 | IgG1 |
| | Immunology. 1995 October; | |
| | 86(2): 319-324. | |
| N297H | Tao and Morrison, | IgG1 |
| | J. Immunol. 1989; 143: | |
| | 2595-2601 | |
| N297Q | Tao and Morrison, | IgG1 |
| | J. Immunol. 1989; 143: | |
| | 2595-2601 | |
| N297K | Tao and Morrison, | IgG3 |
| | J. Immunol. 1989; 143: | |
| | 2595-2601 | |
| N297Q | Tao and Morrison, | IgG3 |
| | J. Immunol. 1989; 143: | |
| | 2595-2601 | |
| D265A | Idusogie et al., 2000 J | IgG1 |
| | Immunol Apr. 15, 2000, 164 | |
| | (8) 4178-4184 | |
| D270A, V, K | Idusogie et al., 2000 J | IgG1 |
| | Immunol Apr. 15, 2000, 164 | |
| | (8) 4178-4184 | |
| K322A, L, M, D, E | Idusogie et al., 2000 J | IgG1 |
| | Immunol Apr. 15, 2000, 164 | |
| | (8) 4178-4184 | |
| P329A, X | Idusogie et al., 2000 J | IgG1 |
| | Immunol Apr. 15, 2000, 164 | |
| | (8) 4178-4184 | |
| P331A, S, G, X | Idusogie et al., 2000 J | IgG1 |
| | Immunol Apr. 15, 2000, 164 | |
| | (8) 4178-4184 | |
| D265A | Idusogie et al., 2000 J | IgG1 |
| | Immunol Apr. 15, 2000, 164 | |
| | (8) 4178-4184 | |
| L234A | Hezareh et al., 2001 J. Virol. | IgG1 |
| | December 2001 vol. 75 no. | |
| | 24 12161-12168 | |
| L234A/L235A | Hezareh et al., 2001 J. Virol. | IgG1 |
| | December 2001 vol. 75 no. | |
| | 24 12161-12168 | |
| L234F/L235E/P331S | Oganesyan et al., 2008 Acta | IgG1 |
| | Cryst. (2008). D64, 700-704 | |
| H268Q/V309L/A330S/P331S | An et al., 2009 mAbs | IgG1 |
| | Volume 1, 2009 - Issue 6, | |
| | pp. 572-579 | |
| G236R/L328R | Moore et al., 2011 mAbs | IgG1 |
| | Volume 3, 2011 - Issue 6, | |
| | pp. 546-557 | |
| N297G | Couch et al., 2013 Sci. | IgG1 |
| | Transl. Med., 5 (2013) | |
| | 183ra57, 1-12 | |
| N297G/D265A | Couch et al., 2013 Sci. | IgG1 |
| | Transl. Med., 5 (2013) | |
| | 183ra57, 1-12 | |
| V234A/G237A/P328S/H268A/ | Vafa et al., 2014 Methods | IgG2 |
| V309L/A330S/P331S | Volume 65, Issue 1, 1 | |
| | Jan. 2014, Pages 114-126 | |
| L234A/L235A/P329G | Lo et al., 2016 The Journal | IgG1 |
| | of Biological Chemistry | |
| | 292, 3900-3908 | |
| N297D | Schlothauer et al., 2016 | IgG1 |
| | Protein Engineering, Design | |
| | and Selection, Volume 29, | |
| | Issue 10, 1 Oct. 2016, | |
| | Pages 457-466 | |
| S228P/L235E | Schlothauer et al., 2016 | IgG4 |
| | Protein Engineering, Design | |
| | and Selection, Volume 29, | |
| | Issue 10, 1 Oct. 2016, | |
| | Pages 457-466 | |
| S228P/L235E/P329G | Schlothauer et al., 2016 | IgG4 |
| | Protein Engineering, Design | |
| | and Selection, Volume 29, | |
| | Issue 10, 1 Oct. 2016, | |
| | Pages 457-466 | |
| L234F/L235A/K322Q | Borrok et al., 2017 J Pharm | IgG1 |
| | Sci April 2017 Volume 106, | |
| | Issue 4, Pages 1008-1017 | |
| L234F/L235Q/P331G | Borrok et al., 2017 J Pharm | IgG1 |
| | Sci April 2017 Volume 106, | |
| | Issue 4, Pages 1008-1017 | |
| L234F/L235Q/K322Q | Borrok et al., 2017 J Pharm | IgG1 |
| | Sci April 2017 Volume 106, | |
| | Issue 4, Pages 1008-1017 | |
| L234A/L235A/G237A/P328S/ | Tam et al., 2017 Open | IgG1 |
| H268A/A330S/P331S | Access | |
| | Antibodies 2017, 6(3), 12; | |
| | doi: 10.3390/antib6030012 | |
| S228P/F234A/L235A | Tam et al., 2017 Open | IgG4 |
| | Access | |
| | Antibodies 2017, 6(3), 12; | |
| | doi: 10.3390/antib6030012 | |
| S228P/F234A/L235A/G237A/ | Tam et al., 2017 Open | IgG4 |
| P238S | Access | |
| | Antibodies 2017, 6(3), 12; | |
| | doi: 10.3390/antib6030012 | |
| S228P/F234A/L235A/G236/ | Tam et al., 2017 Open | IgG4 |
| G237A/P238S | Access | |
| | Antibodies 2017, 6(3), 12; | |
| | doi: 10.3390/antib6030012 | |

[0057] In some embodiments, the Fc domains in the Fc-based chimeric protein complexes of the present technology are homodimeric, i.e., the Fc domain in the chimeric protein complex comprises two identical protein chains.

[0058] In some embodiments, the Fc domains in the Fc-based chimeric protein complexes of the present technology are heterodimeric, i.e., the Fc domain in the chimeric protein complex comprises two non-identical protein chains.

[0059] In some embodiments, heterodimeric Fc domains are engineered using ionic pairing and/or knob-in-hole mutations described herein. In some embodiments, the heterodimeric Fc-based chimeric protein complexes have a trans orientation/configuration. In a trans orientation/configuration, the targeting moiety and human IFNγ or human TNFα signaling agent are, in embodiments, not found on the same polypeptide chain in the present Fc-based chimeric protein complexes. In some embodiments, the human IFNγ or human TNFα signaling agent and targeting moiety are on the same end (N-terminus or C-terminus) of the Fc domain. In some embodiments, the human IFNγ or human TNFα signaling agent and targeting moiety are on different ends (N-terminus or C-terminus) of the Fc domain.

[0060] In some embodiments, heterodimeric Fc domains are engineered using ionic pairing and/or knob-in-hole mutations described herein. In some embodiments, the heterodimeric Fc-based chimeric protein complexes have a trans orientation.

[0061] In a trans orientation, the targeting moiety and human IFNγ or human TNFα signaling agent are, in embodiments, not found on the same polypeptide chain in the present Fc-based chimeric protein complexes. In a trans orientation, the targeting moiety and human IFNγ or human TNFα signaling agent are, in embodiments, found on separate polypeptide chains in the Fc-based chimeric protein complexes. In a cis orientation, the targeting moiety and human IFNγ or human TNFα signaling agent are, in embodiments, found on the same polypeptide chain in the Fc-based chimeric protein complexes.

[0062] In some embodiments, where more than one targeting moiety is present in the heterodimeric protein complexes described herein, one targeting moiety may be in trans orientation (relative to the human IFNγ or human TNFα signaling agent), whereas another targeting moiety may be in cis orientation (relative to the human IFNγ or human TNFα signaling agent). In some embodiments, the human IFNγ or human TNFα signaling agent and target moiety are on the same ends/sides (N-terminal or C-terminal ends) of an Fc domain. In some embodiments, the human IFNγ or human TNFα signaling agent and targeting moiety are on different sides/ends of an Fc domain (N-terminal and C-terminal ends).

[0063] In some embodiments, where more than one targeting moiety is present in the heterodimeric protein complexes described herein, the targeting moieties may be found on the same Fc chain or on two different Fc chains in the heterodimeric protein complex (in the latter case the targeting moieties would be in trans relative to each other, as they are on different Fc chains). In some embodiments, where more than one targeting moiety is present on the same Fc chain, the targeting moieties may be on the same or different sides/ends of an Fc chain (N-terminal or/and C-terminal ends).

[0064] In some embodiments, where more than one human IFNγ or human TNFα signaling agent is present in the heterodimeric protein complexes described herein, the human IFNγ or human TNFα signaling agents may be found on the same Fc chain or on two different Fc chains in the heterodimeric protein complex (in the latter case the human IFNγ or human TNFα signaling agents would be in trans relative to each other, as they are on different Fc chains). In some embodiments, where more than one human IFNγ or human TNFα signaling agent is present on the same Fc chain, the human IFNγ or human TNFα signaling agents may be on the same or different sides/ends of an Fc chain (N-terminal or/and C-terminal ends).

[0065] In some embodiments, where more than one human IFNγ or human TNFα signaling agent is present in the heterodimeric protein complexes described herein, one human IFNγ or human TNFα signaling agent may be in trans orientation (as relates to the targeting moiety), whereas another human IFNγ or human TNFα signaling agent may be in cis orientation (as relates to the targeting moiety).

[0066] In some embodiments, the Fc domains include or start with the core hinge region of wild-type human IgG1, which contains the sequence Cys-Pro-Pro-Cys (SEQ ID NO: 1341). In some embodiments, the Fc domains also include the upper hinge, or parts thereof (e.g., DKTHTCPPC (SEQ ID NO: 1342; see WO2009053368), EPKSCDKTHTCPPC (SEQ ID NO: 1343), or EPKSSDKTHTCPPC (SEQ ID NO: 1344; see Lo et al., Protein Engineering vol. 11 no. 6 pp. 495-500, 1998)).

### Signaling Agents (SA)

[0067] In some embodiments, the Fc-based chimeric protein complexes of the present technology include one or more human IFNγ or human TNFα signaling agents (SA). In some embodiments, the Fc-based chimeric protein complexes disclosed herein include one human IFNγ or human TNFα signaling agent wherein the human IFNγ or human TNFα signaling agent is a multimeric human IFNγ or human TNFα signaling agent. In some embodiments, the Fc-based chimeric protein complexes disclosed herein include at least one monomeric human IFNγ or human TNFα signaling agent and at least one multimeric human IFNγ or human TNFα signaling agent. For example, the Fc-based chimeric protein complexes can include a first monomeric human IFNγ or human TNFα signaling agent attached to a first Fc chain and a first monomer of a second multimeric human IFNγ or human TNFα signaling agent attached to the first Fc chain and a second monomer of the second multimeric human IFNγ or human TNFα signaling agent attached to the second Fc chain wherein assembly of the Fc chains to form an Fc domain causes reconstitution of the multimeric human IFNγ or human TNFα signaling agent that is functional upon such reconstitution.

[0068] The human IFNγ or human TNFα signaling agents, as disclosed herein, are cytokines which are functional as a multimer of monomers. In some embodiments, the human IFNγ or human TNFα signaling agents are wild type or modified. In embodiments, the human IFNγ or human TNFα signaling agents are cytokines which are in solution as a dimer or trimer and typically need to be produced as a multimer to avoid aggregation or monomer exchange. In other embodiments, the human IFNγ or human TNFα signaling agents are cytokines which multimerize only when bound by the receptor and become functional multimers as of receptor interaction.

[0069] The human IFNγ or human TNFα signaling agents, as disclosed herein, can be a wild type human IFNγ or human TNFα signaling agent or a modified human IFNγ or human TNFα signaling agent. In some embodiments, the human IFNγ or human TNFα signaling agent is functional as a multimer of monomers. A human IFNγ or human TNFα signaling agent of the present invention is multimeric when it includes one or more chains of protein. In such instances, where the human IFNγ or human TNFα signaling agent includes multiple chains of protein, each chain of protein present in the human IFNγ or human TNFα signaling agent is referred to as a monomer. For example, the human IFNγ or human TNFα signaling agent can be a monomer, a dimer, a trimer, a tetramer, a pentamer, a hexamer, heptamer and so on depending on the number of protein chains present in the human IFNγ or human TNFα signaling agent. In some embodiments, the human IFNγ or human TNFα signaling agent is a homomeric multimer (where all monomers are the same) or a heteromeric multimer (where two or more different monomers are present in the signaling agent).

[0070] In some embodiments, the human IFNγ or human TNFα signaling agent is a dimer and each monomer of the signaling agent is linked to one Fc chain of the Fc domain. For instance, a first monomer of the dimeric human IFNγ or human TNFα signaling agent is attached to the first Fc chain and a second monomer of the dimeric human IFNγ or human TNFα signaling agent is attached to the second Fc chain. In some embodiments, the dimeric human IFNγ or human TNFα signaling agent is reconstituted upon association of the first and the second Fc chains and upon reconstitution the dimeric human IFNγ or human TNFα signaling agent becomes functional.

[0071] In some embodiments, the human IFNγ or human TNFα signaling agent is a trimer where the first monomer of the human IFNγ or human TNFα signaling agent is linked to a first Fc chain and the second and the third monomer of the human IFNγ or human TNFα signaling agent are linked to the second Fc chain. In some embodiments, the trimeric human IFNγ or human TNFα signaling agent is reconstituted upon association of the first and the second Fc chains and upon reconstitution the trimeric human IFNγ or human TNFα signaling agent becomes functional.

[0072] In some embodiments, the multimeric human IFNγ or human TNFα signaling agents disclosed herein are such that all of the monomers of the human IFNγ or human TNFα signaling agent are modified (e.g., are mutants of the human IFNγ or human TNFα signaling agent). In other embodiments, at least one monomer of the multimeric human IFNγ or human TNFα signaling agent is modified. In some embodiments, all monomers of the multimeric human IFNγ or human TNFα signaling agent have the same modification (or mutation) and in other embodiments, each monomer of the multimeric human IFNγ or human TNFα signaling agent is modified with different mutations. In embodiments, a reconstituted dimer human IFNγ or human TNFα signaling agent comprises one mutation or two mutations. In embodiments, a reconstituted trimer human IFNγ or human TNFα signaling agent comprises one mutation or two mutations or three mutations.

[0073] In various embodiments, the Fc-based chimeric protein complex comprises a wild type human IFNγ or human TNFα signaling agent that has improved target selectivity and safety relative to a human IFNγ or human TNFα signaling agent which is not fused to an Fc, or a human IFNγ or human TNFα signaling agent which is not in the context of a complex, e.g., without limitation, a heterodimeric complex. In various embodiments, the Fc-based chimeric protein complex comprises a wild type human IFNγ or human TNFα signaling agent that has improved target selective activity relative to a human IFNγ or human TNFα signaling agent which is not fused to an Fc, or a human IFNγ or human TNFα signaling agent which is not in the context of a complex, e.g., without limitation, a heterodimeric complex. In various embodiments, the Fc-based chimeric protein complex allows for conditional activity.

[0074] In various embodiments, the Fc-based chimeric protein complex comprises a human IFNγ or human TNFα wild type signaling agent that has one or more of attenuated activity such as one or more of reduced binding affinity, reduced endogenous activity, and reduced specific bioactivity as compared to the human IFNγ or human TNFα signaling agent which is not fused to an Fc, or a human IFNγ or human TNFα signaling agent which is not in the context of a complex, e.g., without limitation, a heterodimeric complex.

[0075] In various embodiments, the Fc-based chimeric protein complex comprises a wild type human IFNγ or human TNFα signaling agent that has improved safety, e.g. reduced systemic toxicity, reduced side effects, and reduced off-target effects relative to a human IFNγ or human TNFα signaling agent which is not fused to an Fc, or a human IFNγ or human TNFα signaling agent which is not in the context of a complex, e.g., without limitation, a heterodimeric complex. In various embodiments, improved safety means that the present Fc-based chimeric protein provides lower toxicity (e.g. systemic toxicity and/or tissue/organ-associated toxicities); and/or lessened or substantially eliminated side effects; and/or increased tolerability, lessened or substantially eliminated adverse events; and/or reduced or substantially eliminated off-target effects; and/or an increased therapeutic window of the wild type human IFNγ or human TNFα signaling agent as compared to the human IFNγ or human TNFα signaling agent which is not fused to an Fc, or a human IFNγ or human TNFα signaling agent which is not in the context of a complex, e.g., without limitation, a heterodimeric complex.

[0076] In some embodiments, the reduced affinity or activity at the receptor is restorable by inclusion in the present complex having one or more of the targeting moieties as described herein.

[0077] In various embodiments, the Fc-based chimeric protein complex comprises a wild type human IFNγ or human TNFα signaling agent that has reduced, substantially reduced, or ablated affinity, e.g. binding (e.g. K_{D}) and/or activation (for instance, when the modified human IFNγ or human TNFα signaling agent is an agonist of its receptor, measurable as, for example, K_{A} and/or EC₅₀) and/or inhibition (for instance, when the modified human IFNγ or human TNFα signaling agent is an antagonist of its receptor, measurable as, for example, K_{I} and/or IC₅₀), for one or more of its receptors. In various embodiments, the reduced affinity at the human IFNγ or human TNFα signaling agent's receptor allows for attenuation of activity. In such embodiments, the modified human IFNγ or human TNFα signaling agent has about 1%, or about 3%, about 5%, about 10%, about 15%, about 20%, about 25%, about 30%, about 35%, about 40%, about 45%, about 50%, about 60%, about 65%, about 70%, about 75%, about 80%, about 85%, about 90%, about 95%, or about 10%-20%, about 20%-40%, about 50%, about 40%-60%, about 60%-80%, about 80%-100% of the affinity for the receptor as compared to the human IFNγ or human TNFα signaling agent which is not fused to an Fc, or a human IFNγ or human TNFα signaling agent which is not in the context of a complex, e.g., without limitation, a heterodimeric complex. In some embodiments, the binding affinity is at least about 2-fold lower, about 3-fold lower, about 4-fold lower, about 5-fold lower, about 6-fold lower, about 7-fold lower, about 8-fold lower, about 9-fold lower, at least about 10-fold lower, at least about 15-fold lower, at least about 20-fold lower, at least about 25-fold lower, at least about 30-fold lower, at least about 35-fold lower, at least about 40-fold lower, at least about 45-fold lower, at least about 50-fold lower, at least about 100-fold lower, at least about 150-fold lower, or about 10-50-fold lower, about 50-100-fold lower, about 100-150-fold lower, about 150-200-fold lower, or more than 200-fold lower as compared to the human IFNγ or human TNFα signaling agent which is not fused to an Fc, or a human IFNγ or human TNFα signaling agent which is not in the context of a complex, e.g., without limitation, a heterodimeric complex.

[0078] In various embodiments, the Fc-based chimeric protein complex comprises a wild type human IFNγ or human TNFα signaling agent that has reduced endogenous activity of the human IFNγ or human TNFα signaling agent to about 75%, or about 70%, or about 60%, or about 50%, or about 40%, or about 30%, or about 25%, or about 20%, or about 10%, or about 5%, or about 3%, or about 1%, e.g., as compared to the human IFNγ or human TNFα signaling agent which is not fused to an Fc, or a human IFNγ or human TNFα signaling agent which is not in the context of a complex, e.g., without limitation, a heterodimeric complex.

[0079] In various embodiments, the human IFNγ or human TNFα signaling agent has one or more mutations that confer improved target selectivity and safety relative to a wild type human IFNγ or human TNFα signaling agent. In various embodiments, the human IFNγ or human TNFα signaling agent has one or more mutations that confer improved target selective activity relative to a wild type human IFNγ or human TNFα signaling agent. In various embodiments, the human IFNγ or human TNFα signaling agent has one or more mutations that allow for conditional activity.

[0080] In various embodiments, the human IFNγ or human TNFα signaling agent is modified to have reduced affinity or activity for one or more of its receptors, which allows for attenuation of activity (inclusive of agonism or antagonism) and/or prevents non-specific signaling or undesirable sequestration of the Fc-based chimeric protein complex.

[0081] In various embodiments, the human IFNγ or human TNFα signaling agent is agonistic in its wild type form and bears one or more mutations that attenuate its agonistic activity.

[0082] In various embodiments, the human IFNγ or human TNFα signaling agent is antagonistic in its wild type form and bears one or more mutations that attenuate its antagonistic activity. In various embodiments, the human IFNγ or human TNFα signaling agent is antagonistic due to one or more mutations, e.g. an agonistic signaling agent is converted to an antagonistic human IFNγ or human TNFα signaling agent and, such a converted human IFNγ or human TNFα signaling agent, optionally, also bears one or more mutations that attenuate its antagonistic activity (e.g. as described in WO 2015/007520, the entire contents of which are hereby incorporated by reference).

[0083] Accordingly, in various embodiments, the human IFNγ or human TNFα signaling agent is a modified (e.g. mutant) form (e.g., having one or more mutations) of a wild type human IFNγ or human TNFα signaling agent. In various embodiments, the modifications (e.g. mutations) allow for the modified human IFNγ or human TNFα signaling agent to have one or more of attenuated activity such as one or more of reduced binding affinity, reduced endogenous activity, and reduced specific bioactivity as compared to the unmodified or unmutated human IFNγ or human TNFα signaling agent, i.e. the wild type form of the human IFNγ or human TNFα signaling agent (e.g. comparing the same signaling agent in a wild type form versus a modified or mutant form). In some embodiments, the mutations which attenuate or reduce binding or affinity include those mutations which substantially reduce or ablate binding or activity. In some embodiments, the mutations which attenuate or reduce binding or affinity are different from those mutations which substantially reduce or ablate binding or activity. Consequentially, in various embodiments, the mutations allow for the human IFNγ or human TNFα signaling agent to have improved safety, e.g. reduced systemic toxicity, reduced side effects, and reduced off-target effects relative to unmutated, i.e. wild type, human IFNγ or human TNFα signaling agent (e.g. comparing the same signaling agent in a wild type form versus a modified (e.g. mutant) form).

[0084] As described herein, the human IFNγ or human TNFα signaling agent may have improved safety due to one of more modifications, e.g. mutations. In various embodiments, improved safety means that the present Fc-based chimeric protein provides lower toxicity (e.g. systemic toxicity and/or tissue/organ-associated toxicities); and/or lessened or substantially eliminated side effects; and/or increased tolerability, lessened or substantially eliminated adverse events; and/or reduced or substantially eliminated off-target effects; and/or an increased therapeutic window.

[0085] In various embodiments, the human IFNγ or human TNFα signaling agent is modified to have one or more mutations that reduce its binding affinity or activity for one or more of its receptors. In some embodiments, the human IFNγ or human TNFα signaling agent is modified to have one or more mutations that substantially reduce or ablate binding affinity or activity for the receptors. In some embodiments, the activity provided by the wild type human IFNγ or human TNFα signaling agent is agonism at the receptor (e.g. activation of a cellular effect at a site of therapy). For example, the wild type human IFNγ or human TNFα signaling agent may activate its receptor. In such embodiments, the mutations result in the modified human IFNγ or human TNFα signaling agent to have reduced or ablated activating activity at the receptor. For example, the mutations may result in the modified human IFNγ or human TNFα signaling agent to deliver a reduced activating signal to a target cell or the activating signal could be ablated. In some embodiments, the activity provided by the wild type human IFNγ or human TNFα signaling agent is antagonism at the receptor (e.g. blocking or dampening of a cellular effect at a site of therapy). For example, the wild type human IFNγ or human TNFα signaling agent may antagonize or inhibit the receptor. In these embodiments, the mutations result in the modified human IFNγ or human TNFα signaling agent to have a reduced or ablated antagonizing activity at the receptor. For example, the mutations may result in the modified human IFNγ or human TNFα signaling agent to deliver a reduced inhibitory signal to a target cell or the inhibitory signal could be ablated. In various embodiments, the human IFNγ or human TNFα signaling agent is antagonistic due to one or more mutations, e.g. an agonistic signaling agent is converted to an antagonistic human IFNγ or human TNFα signaling agent (e.g. as described in WO 2015/007520, the entire contents of which are hereby incorporated by reference) and, such a converted human IFNγ or human TNFα signaling agent, optionally, also bears one or more mutations that reduce its binding affinity or activity for one or more of its receptors or that substantially reduce or ablate binding affinity or activity for one or more of its receptors.

[0086] In some embodiments, the reduced affinity or activity at the receptor is restorable by inclusion in the present complex having one or more of the targeting moieties as described herein. In other embodiments, the reduced affinity or activity at the receptor is not substantially restorable by the activity of one or more of the targeting moieties.

[0087] In various embodiments, the Fc-based chimeric protein complex of the present technology reduces off-target effects because the human IFNγ or human TNFα signaling agents have mutations that weaken or ablate binding affinity or activity at a receptor. In various embodiments, this reduction in side effects is observed relative with, for example, the wild type human IFNγ or human TNFα signaling agents. In various embodiments, the human IFNγ or human TNFα signaling agent is active on target cells because the targeting moiety(ies) compensates for the missing/insufficient binding (e.g., without limitation and/or avidity) required for substantial activation. In various embodiments, the wild type or modified human IFNγ or human TNFα signaling agent is substantially inactive en route to the site of therapeutic activity and has its effect substantially on specifically targeted cell types which greatly reduces cross-reactivities and/or potentially associated side effects.

[0088] In some embodiments, the human IFNγ or human TNFα signaling agent includes one or more mutations that attenuate or reduce binding or affinity for one receptor (i.e., a therapeutic receptor) and one or more mutations that substantially reduce or ablate binding or activity at a second receptor. In such embodiments, these mutations may be at the same or at different positions (i.e., the same mutation or multiple mutations). In some embodiments, the mutation(s) that reduce binding and/or activity at one receptor is different from the mutation(s) that substantially reduce or ablate at another receptor. In some embodiments, the mutation(s) that reduce binding and/or activity at one receptor is the same as the mutation(s) that substantially reduce or ablate at another receptor. In some embodiments, the present Fc-based chimeric protein complexes have a modified human IFNγ or human TNFα signaling agent that has both mutations that attenuate binding and/or activity at a therapeutic receptor and therefore allow for a more controlled, on-target therapeutic effect (e.g. relative to wild type human IFNγ or human TNFα) and mutations that substantially reduce or ablate binding and/or activity at another receptor and therefore reduce side effects (e.g. relative to wild type human IFNγ or human TNFα).

[0089] In some embodiments, the substantial reduction or ablation of binding or activity is not substantially restorable with a targeting moiety described herein. In some embodiments, the substantial reduction or ablation of binding or activity is restorable with a targeting moiety. In various embodiments, substantially reducing or ablating binding or activity at a second receptor also may prevent deleterious effects that are mediated by the other receptor. Alternatively, or in addition, substantially reducing or ablating binding or activity at the other receptor causes the therapeutic effect to improve as there is a reduced or eliminated sequestration of the therapeutic Fc-based chimeric protein complexes away from the site of therapeutic action. For instance, in some embodiments, this obviates the need of high doses of the present Fc-based chimeric protein complexes that compensate for loss at the other receptor. Such ability to reduce dose further provides a lower likelihood of side effects.

[0090] In various embodiments, the modified human IFNγ or human TNFα signaling agent comprises one or more mutations that cause the human IFNγ or human TNFα signaling agent to have reduced, substantially reduced, or ablated affinity, e.g. binding (e.g. K_{D}) and/or activation (for instance, when the modified human IFNγ or human TNFα signaling agent is an agonist of its receptor, measurable as, for example, K_{A} and/or EC₅₀) and/or inhibition (for instance, when the modified human IFNγ or human TNFα signaling agent is an antagonist of its receptor, measurable as, for example, K_{I} and/or IC₅₀), for one or more of its receptors. In various embodiments, the reduced affinity at the human IFNγ or human TNFα signaling agent's receptor allows for attenuation of activity (inclusive of agonism or antagonism). In such embodiments, the modified human IFNγ or human TNFα signaling agent has about 1%, or about 3%, about 5%, about 10%, about 15%, about 20%, about 25%, about 30%, about 35%, about 40%, about 45%, about 50%, about 60%, about 65%, about 70%, about 75%, about 80%, about 85%, about 90%, about 95%, or about 10%-20%, about 20%-40%, about 50%, about 40%-60%, about 60%-80%, about 80%-100% of the affinity for the receptor relative to the wild type human IFNγ or human TNFα signaling agent. In some embodiments, the binding affinity is at least about 2-fold lower, about 3-fold lower, about 4-fold lower, about 5-fold lower, about 6-fold lower, about 7-fold lower, about 8-fold lower, about 9-fold lower, at least about 10-fold lower, at least about 15-fold lower, at least about 20-fold lower, at least about 25-fold lower, at least about 30-fold lower, at least about 35-fold lower, at least about 40-fold lower, at least about 45-fold lower, at least about 50-fold lower, at least about 100-fold lower, at least about 150-fold lower, or about 10-50-fold lower, about 50-100-fold lower, about 100-150-fold lower, about 150-200-fold lower, or more than 200-fold lower relative to the wild type human IFNγ or human TNFα signaling agent.

[0091] In embodiments wherein the Fc-based chimeric protein complex comprises a modified human IFNγ or human TNFα signaling agent having mutations that reduce binding at one receptor and substantially reduce or ablate binding at a second receptor, the attenuation or reduction in binding affinity of the modified human IFNγ or human TNFα signaling agent for one receptor is less than the substantial reduction or ablation in affinity for the other receptor. In some embodiments, the attenuation or reduction in binding affinity of the modified human IFNγ or human TNFα signaling agent for one receptor is less than the substantial reduction or ablation in affinity for the other receptor by about 1%, or about 3%, about 5%, about 10%, about 15%, about 20%, about 25%, about 30%, about 35%, about 40%, about 45%, about 50%, about 60%, about 65%, about 70%, about 75%, about 80%, about 85%, about 90%, or about 95%. In various embodiments, substantial reduction or ablation refers to a greater reduction in binding affinity and/or activity than attenuation or reduction.

[0092] In various embodiments, the modified human IFNγ or human TNFα signaling agent comprises one or more mutations that reduce the endogenous activity of the human IFNγ or human TNFα signaling agent to about 75%, or about 70%, or about 60%, or about 50%, or about 40%, or about 30%, or about 25%, or about 20%, or about 10%, or about 5%, or about 3%, or about 1%, e.g., relative to the wild type human IFNγ or human TNFα signaling agent.

[0093] In some embodiments, the modified human IFNγ or human TNFα signaling agent comprises one or more mutations that cause the human IFNγ or human TNFα signaling agent to have reduced affinity for its receptor that is lower than the binding affinity of the targeting moiety(ies) for its(their) receptor(s). In some embodiments, this binding affinity differential is between signaling agent/receptor and targeting moiety/receptor on the same cell. In some embodiments, this binding affinity differential allows for the human IFNγ or human TNFα signaling agent, e.g. mutated human IFNγ or human TNFα signaling agent, to have localized, on-target effects and to minimize off-target effects that underlie side effects that are observed with wild type human IFNγ or human TNFα signaling agent. In some embodiments, this binding affinity is at least about 2-fold, or at least about 5-fold, or at least about 10-fold, or at least about 15-fold lower, or at least about 25-fold, or at least about 50-fold lower, or at least about 100-fold, or at least about 150-fold.

[0094] Receptor binding activity may be measured using methods known in the art. For example, affinity and/or binding activity may be assessed by Scatchard plot analysis and computer-fitting of binding data (e.g. Scatchard, The attractions of proteins for small molecules and ions. Ann NY Acad Sci 51: 660-672, 1949) or by reflectometric interference spectroscopy under flow through conditions, as described by Brecht et al. Biosens Bioelectron 1993; 8:387-392, the entire contents of all of which are hereby incorporated by reference.

[0095] The amino acid sequences of the wild type human IFNγ or human TNFα signaling agents described herein are well known in the art. Accordingly, in various embodiments the modified human IFNγ or human TNFα signaling agent comprises an amino acid sequence that has at least about 60%, or at least about 61%, or at least about 62%, or at least about 63%, or at least about 64%, or at least about 65%, or at least about 66%, or at least about 67%, or at least about 68%, or at least about 69%, or at least about 70%, or at least about 71%, or at least about 72%, or at least about 73%, or at least about 74%, or at least about 75%, or at least about 76%, or at least about 77%, or at least about 78%, or at least about 79%, or at least about 80%, or at least about 81%, or at least about 82%, or at least about 83%, or at least about 84%, or at least about 85%, or at least about 86%, or at least about 87%, or at least about 88%, or at least about 89%, or at least about 90%, or at least about 91%, or at least about 92%, or at least about 93%, or at least about 94%, or at least about 95%, or at least about 96%, or at least about 97%, or at least about 98%, or at least about 99% sequence identity with the known wild type amino acid sequences of the human IFNγ or human TNFα signaling agents described herein (e.g. about 60%, or about 61%, or about 62%, or about 63%, or about 64%, or about 65%, or about 66%, or about 67%, or about 68%, or about 69%, or about 70%, or about 71%, or about 72%, or about 73%, or about 74%, or about 75%, or about 76%, or about 77%, or about 78%, or about 79%, or about 80%, or about 81%, or about 82%, or about 83%, or about 84%, or about 85%, or about 86%, or about 87%, or about 88%, or about 89%, or about 90%, or about 91%, or about 92%, or about 93%, or about 94%, or about 95%, or about 96%, or about 97%, or about 98%, or about 99% sequence identity).

[0096] In various embodiments the modified human IFNγ or human TNFα signaling agent comprises an amino acid sequence that has at least about 60%, or at least about 61%, or at least about 62%, or at least about 63%, or at least about 64%, or at least about 65%, or at least about 66%, or at least about 67%, or at least about 68%, or at least about 69%, or at least about 70%, or at least about 71%, or at least about 72%, or at least about 73%, or at least about 74%, or at least about 75%, or at least about 76%, or at least about 77%, or at least about 78%, or at least about 79%, or at least about 80%, or at least about 81%, or at least about 82%, or at least about 83%, or at least about 84%, or at least about 85%, or at least about 86%, or at least about 87%, or at least about 88%, or at least about 89%, or at least about 90%, or at least about 91%, or at least about 92%, or at least about 93%, or at least about 94%, or at least about 95%, or at least about 96%, or at least about 97%, or at least about 98%, or at least about 99% sequence identity with any amino acid sequences of the human IFNγ or human TNFα signaling agents described herein (e.g. about 60%, or about 61%, or about 62%, or about 63%, or about 64%, or about 65%, or about 66%, or about 67%, or about 68%, or about 69%, or about 70%, or about 71%, or about 72%, or about 73%, or about 74%, or about 75%, or about 76%, or about 77%, or about 78%, or about 79%, or about 80%, or about 81%, or about 82%, or about 83%, or about 84%, or about 85%, or about 86%, or about 87%, or about 88%, or about 89%, or about 90%, or about 91%, or about 92%, or about 93%, or about 94%, or about 95%, or about 96%, or about 97%, or about 98%, or about 99% sequence identity).

[0097] In various embodiments, the modified human IFNγ or human TNFα signaling comprises an amino acid sequence having one or more amino acid mutations. In some embodiments, the one or more amino acid mutations may be independently selected from substitutions, insertions, deletions, and truncations. In some embodiments, the amino acid mutations are amino acid substitutions, and may include conservative and/or non-conservative substitutions, as described elsewhere herein.

[0098] In various embodiments, the modified human IFNγ or human TNFα signaling agent comprises a truncation of one or more amino acids, e.g. an N-terminal truncation and/or a C-terminal truncation.

[0099] In various embodiments, the substitutions may also include non-classical amino acids as described elsewhere herein.

[0100] As described herein, the modified human IFNγ or human TNFα signaling agents bear mutations that affect affinity and/or activity at one or more receptors. In various embodiments, there is reduced affinity and/or activity at a therapeutic receptor, e.g. a receptor through which a desired therapeutic effect is mediated (e.g. agonism or antagonism). In various embodiments, the modified human IFNγ or human TNFα signaling agents bear mutations that substantially reduce or ablate affinity and/or activity at a receptor, e.g. a receptor through which a desired therapeutic effect is not mediated (e.g. as the result of promiscuity of binding). The receptors of the human IFNγ or human TNFα signaling agents, as described herein, are known in the art.

[0101] Illustrative mutations which provide reduced affinity and/or activity (e.g. agonistic) at a receptor are found in WO 2013/107791 and PCT/EP2017/061544 (e.g. with regard to interferons), WO 2015/007542 (e.g. with regard to interleukins), and WO 2015/007903 (e.g. with regard to TNF), the entire contents of each of which are hereby incorporated by reference. Illustrative mutations which provide reduced affinity and/or activity (e.g. antagonistic) at a therapeutic receptor are found in WO 2015/007520, the entire contents of which are hereby incorporated by reference.

[0102] In some embodiments, the modified human IFNγ or human TNFα signaling agent comprises one or more mutations that cause the human IFNγ or human TNFα signaling agent to have reduced affinity and/or activity for a a type II cytokine receptor or a receptor in the Tumor Necrosis Factor Receptor (TNFR) superfamily.

[0103] In various embodiments, the receptor for the human IFNγ signaling agent is a Type II cytokine receptor. Type II cytokine receptors are multimeric receptors composed of heterologous subunits, and are receptors mainly for interferons. Illustrative type II cytokine receptors include, but are not limited to, IFN-γ receptor (e.g. IFNGR1 and IFNGR2).

[0104] In various embodiments, the receptor for the human TNFα signaling agent is a TNFR family member. Tumor necrosis factor receptor (TNFR) family members share a cysteine-rich domain (CRD) formed of three disulfide bonds surrounding a core motif of CXXCXXC creating an elongated molecule. Exemplary tumor necrosis factor receptor family members include: CDI 20a (TNFRSFIA), CD 120b (TNFRSFIB), Lymphotoxin beta receptor (LTBR, TNFRSF3), CD 134 (TNFRSF4), CD40 (CD40, TNFRSF5), FAS (FAS, TNFRSF6), TNFRSF6B (TNFRSF6B), CD27 (CD27, TNFRSF7), CD30 (TNFRSF8), CD137 (TNFRSF9), TNFRSFIOA (TNFRSFIOA), TNFRSFIOB, (TNFRSFIOB), TNFRSFIOC (TNFRSFIOC), TNFRSFIOD (TNFRSFIOD), RANK (TNFRSFI IA), Osteoprotegerin (TNFRSFI IB), TNFRSF12A (TNFRSF12A), TNFRSF13B (TNFRSF13B), TNFRSF13C (TNFRSF13C), TNFRSF14 (TNFRSF14), Nerve growth factor receptor (NGFR, TNFRSF16), TNFRSF17 (TNFRSF17), TNFRSF18 (TNFRSF18), TNFRSF19 (TNFRSF19), TNFRSF21 (TNFRSF21), and TNFRSF25 (TNFRSF25). In an embodiment, the TNFR family member is CD120a (TNFRSF1A) or TNF-R1. In another embodiment, the TNFR family member is CD 120b (TNFRSFIB) or TNF-R2.

[0105] In embodiments, the signaling agent is a wild type or modified interferon γ. The IFN-γ monomer consists of a core of six α-helices and an extended unfolded sequence in the C-terminal region. Interferon γ is biological active as a dimer. In some embodiments, the Fc domain of the present invention includes two Fc chains where one Fc chain includes a first monomer of IFN-γ and the second Fc chain includes a second monomer of IFN-γ. The Fc chains assemble to form the Fc domain and this association of the Fc chains cause reconstitution of the IFN-γ monomers into a functional dimer.

[0106] In some embodiments, the modified interferon γ agent has reduced affinity and/or activity for the interferon-gamma receptor (IFNGR), i.e., IFNGR1 and IFNGR2 chains. In some embodiments, the modified interferon γ agent has substantially reduced or ablated affinity and/or activity for the interferon-gamma receptor (IFNGR), i.e., IFNGR1 and/or IFNGR2 chains.

[0107] For example, the mutant IFN-γ can include a mutation, by way of non-limiting example, a truncation. In embodiments, the mutant IFN-γ has a truncation at the C-terminus, e.g. of about 5 to about 20 amino acid residues, or of about 19 amino acid residues, or of about 18 amino acid residues, or of about 17 amino acid residues, or of about 16 amino acid residues, or of about 15 amino acid residues, or of about 14 amino acid residues, or of about 13 amino acid residues, or of about 12 amino acid residues, or of about 11 amino acid residues, or of about 10 amino acid residues, or of about 9 amino acid residues, or of about 8 amino acid residues, or of about 7 amino acid residues, or of about 6 amino acid residues, or of about 5 amino acid residues. In embodiments, the mutant IFN-γ has one or more mutations at positions Q1, V5, E9, K12, H19, S20, V22, A23, D24, N25, G26, T27, L30, K108, H111, E112, I114, Q115, A118, E119, and K125. In embodiments, the mutant IFN-γ has one or more mutations are substitutions selected from V5E, S20E, V22A, A23G, A23F, D24G, G26Q, H111A, H111D, I114A, Q115A, and A118G. In embodiments, the mutant IFN-γ comprises the V22A mutation. In embodiments, the mutant IFN-γ comprises the A23G mutation. In embodiments, the mutant IFN-γ comprises the D24G mutation. In embodiments, the mutant IFN-γ comprises the H111A mutation or the H111D mutation. In embodiments, the mutant IFN-γ comprises the I114A mutation. In embodiments, the mutant IFN-γ comprises the Q115A mutation. In embodiments, the mutant IFN-γ comprises the A118G mutation. In embodiments, the mutant IFN-γ comprises the A23G mutation and the D24G mutation. In embodiments, the mutant IFN-γ comprises the I114A mutation and the A118G mutation. IFN-γ is shown in SEQ ID NO: 1563 below and all mutations are relative to SEQ ID NO: 1563:

(SEQ ID NO: 1563)
MKYTSYILAFQLCIVLGSLGCYCQDPYVKEAENLKKYFNAGHSDVADNGT
LFLGILKNWKEESDRKIMQSQIVSFYFKLFKNFKDDQSIQKSVETIKEDM
NVKFFNSNKKKRDDFEKLTNYSVTDLNVQRKAIHELIQVMAELSPAAKTG
KRKRSQMLFRGRRASQ.

[0108] In some embodiments, the Fc based chimeric proteins of the present invention include a modified IFNγ as the signaling moiety and a targeting moiety that binds to Clec9A.

[0109] In some embodiments, the reduced affinity or activity at the therapeutic receptor is restorable by inclusion in the present complex having one or more of the targeting moieties as described herein. In other embodiments, the reduced affinity or activity at the therapeutic receptor is not substantially restorable by inclusion in the present complex having one or more of the targeting moieties as described herein. In various embodiments, the therapeutic Fc-based chimeric protein complexes of the present invention reduce off-target effects because the consensus interferon variant has mutations that weaken binding affinity or activity at a therapeutic receptor. In various embodiments, this reduces side effects observed with, for example, the wild type consensus interferon. In various embodiments, the consensus interferon variant is substantially inactive en route to the site of therapeutic activity and has its effect substantially on specifically targeted cell types which greatly reduces undesired side effects.

[0110] In some embodiments, the wild type or modified signaling agent is TNFα. TNFα is a pleiotropic cytokine with many diverse functions, including regulation of cell growth, differentiation, apoptosis, tumorigenesis, viral replication, autoimmunity, immune cell functions and trafficking, inflammation, and septic shock. It binds to two distinct membrane receptors on target cells: TNFR1 (p55) and TNFR2 (p75). TNFR1 exhibits a very broad expression pattern whereas TNFR2 is expressed preferentially on certain populations of lymphocytes, Tregs, endothelial cells, certain neurons, microglia, cardiac myocytes and mesenchymal stem cells. Very distinct biological pathways are activated in response to receptor activation, although there is also some overlap. As a general rule, without wishing to be bound by theory, TNFR1 signaling is associated with induction of apoptosis (cell death) and TNFR2 signaling is associated with activation of cell survival signals (e.g. activation of NFkB pathway). Administration of TNF is systemically toxic, and this is largely due to TNFR1 engagement. However, it should be noted that activation of TNFR2 is also associated with a broad range of activities and, as with TNFR1, in the context of developing TNFα based therapeutics, control over TNFα targeting and activity is important.

[0111] In some embodiments, the Fc domain of the present invention includes two Fc chains where one Fc chain includes a first monomer of TNFα and the second Fc chain includes a second and a third monomer of TNFα. The Fc chains assemble to form the Fc domain and this association of the Fc chains cause reconstitution of the TNFα monomers into a functional TNFα. In some embodiments, the Fc based chimeric proteins of the present invention include TNFα as the signaling agent and a targeting moiety that binds to CD20.

[0112] In some embodiments, the modified human TNFα signaling agent has reduced affinity and/or activity for TNFR1 and/or TNFR2. In some embodiments, the modified human TNFα signaling agent has substantially reduced or ablated affinity and/or activity for TNFR1 and/or TNFR2. TNFR1 is expressed in most tissues, and is involved in cell death signaling while, by contrast, TNFR2 is involved in cell survival signaling. Accordingly, in embodiments directed to methods of treating cancer, the modified human TNFα signaling agent has reduced affinity and/or activity for TNFR1 and/or substantially reduced or ablated affinity and/or activity for TNFR2. In these embodiments, the Fc-based chimeric protein complexes may be targeted to a cell for which apoptosis is desired, e.g. a tumor cell or a tumor vasculature endothelial cell. In embodiments directed to methods of promoting cell survival, for example, in neurogenesis for the treatment of neurodegenerative disorders, the modified human TNFα signaling agent has reduced affinity and/or activity for TNFR2 and/or substantially reduced or ablated affinity and/or activity for TNFR1. Stated another way, the present Fc-based chimeric protein complexes, in some embodiments, comprise modified TNFα agent that allows of favoring either death or survival signals.

[0113] In some embodiments, the Fc-based chimeric protein complex has a modified TNFα having reduced affinity and/or activity for TNFR1 and/or substantially reduced or ablated affinity and/or activity for TNFR2. Such an Fc-based chimeric protein complex, in some embodiments, is a more potent inducer of apoptosis as compared to a wild type TNFα and/or an Fc-based chimeric protein complex bearing only mutation(s) causing reduced affinity and/or activity for TNFR1. Such an Fc-based chimeric protein complex, in some embodiments, finds use in inducing tumor cell death or a tumor vasculature endothelial cell death (e.g. in the treatment of cancers). Also, in some embodiments, these Fc-based chimeric protein complexes avoid or reduce activation of T_{reg} cells via TNFR2, for example, thus further supporting TNFR1-mediated antitumor activity in vivo.

[0114] In some embodiments, the Fc-based chimeric protein complex has a modified TNFα having reduced affinity and/or activity for TNFR2 and/or substantially reduced or ablated affinity and/or activity for TNFR1. Such an Fc-based chimeric protein complex, in some embodiments, is a more potent activator of cell survival in some cell types, which may be a specific therapeutic objective in various disease settings, including without limitation, stimulation of neurogenesis. In addition, such a TNFR2-favoring Fc-based chimeric protein complexes also are useful in the treatment of autoimmune diseases (e.g. Crohn's, diabetes, MS, colitis etc. and many others described herein). In some embodiments, the Fc-based chimeric protein complex is targeted to auto-reactive T cells. In some embodiments, the Fc-based chimeric protein complex promotes T_{reg} cell activation and indirect suppression of cytotoxic T cells.

[0115] In some embodiments, the Fc-based chimeric protein complex causes the death of auto-reactive T cells, e.g. by activation of TNFR2 and/or avoidance TNFR1 (e.g. a modified TNFα having reduced affinity and/or activity for TNFR2 and/or substantially reduced or ablated affinity and/or activity for TNFR1). Without wishing to be bound by theory these auto-reactive T cells, have their apoptosis/survival signals altered e.g. by NFkB pathway activity/signaling alterations. In some embodiments, the Fc-based chimeric protein complex causes the death of autoreactive T cells having lesions or modifications in the NFκB pathway, which underlie an imbalance of their cell death (apoptosis)/survival signaling properties and, optionally, altered susceptibility to certain death-inducing signals (e.g., TNFR2 activation).

[0116] In some embodiments, a TNFR-2 based Fc-based chimeric protein complex has additional therapeutic applications in diseases, including autoimmune disease, various heart disease, de-myelinating and neurodegenerative disorders, and infectious disease, among others.

[0117] In an embodiment, the wild type TNFα has the amino acid sequence of:

(SEQ ID NO: 14)
VRSSSRTPSDKPVAHVVANPQAEGQLQWLNRRANALLANGVELRDNQLVV
PSEGLYLIYSQVLFKGQGCPSTHVLLTHTISRIAVSYQTKVNLLSAIKSP
CQRETPEGAEAKPWYEPIYLGGVFQLEKGDRLSAEINRPDYLDFAESGQV
YFGIIAL.

[0118] In such embodiments, the modified TNFα agent has mutations at one or more amino acid positions 29, 31, 32, 84, 85, 86, 87, 88, 89, 145, 146 and 147 which produces a modified TNFα with reduced receptor binding affinity. See, for example, U.S. Pat. No. 7,993,636, the entire contents of which are hereby incorporated by reference.

[0119] In some embodiments, the modified human TNFα signaling agent has mutations at one or more amino acid positions R32, N34, Q67, H73, L75, T77, S86, Y87, V91, 197, T105, P106, A109, P113, Y115, E127, N137, D143, A145, and E146 as described, for example, in WO/2015/007903, the entire contents of which is hereby incorporated by reference (numbering according to the human TNFα sequence, Genbank accession number BAG70306, version BAG70306.1 GI: 197692685). In some embodiments, the modified human TNFα signaling agent has substitution mutations selected from L29S, R32G, R32W, N34G, Q67G, H73G, L75G, L75A, L75S, T77A, S86G, S86T, Y87Q, Y87L, Y87A, Y87F, Y87H, V91G, V91A, I97A, I97Q, 197S, T105G, P106G, A109Y, P113G, Y115G, Y115A, E127G, N137G, D143N, A145G, A145R, A145T, E146D, E146K, and S147D. In some embodiments, the human TNFα signaling agent has a mutation selected from Y87Q, Y87L, Y87A, Y87F, and Y87H. In another embodiment, the human TNFα signaling agent has a mutation selected from I97A, I97Q, and 197S. In a further embodiment, the human TNFα signaling agent has a mutation selected from Y115A and Y115G. In some embodiments, the human TNFα signaling agent has an E146K mutation. In some embodiments, the human TNFα signaling agent has an Y87H and an E146K mutation. In some embodiments, the human TNFα signaling agent has an Y87H and an A145R mutation. In some embodiments, the human TNFα signaling agent has a R32W and a S86T mutation. In some embodiments, the human TNFα signaling agent has a R32W and an E146K mutation. In some embodiments, the human TNFα signaling agent has a L29S and a R32W mutation. In some embodiments, the human TNFα signaling agent has a D143N and an A145R mutation. In some embodiments, the human TNFα signaling agent has a D143N and an A145R mutation. In some embodiments, the human TNFα signaling agent has an A145T, an E146D, and a S147D mutation. In some embodiments, the human TNFα signaling agent has an A145T and a S147D mutation.

[0120] In some embodiments, the modified TNFα signaling agent has one or more mutations selected from N39Y, S147Y, and Y87H, as described in WO2008/124086, the entire contents of which is hereby incorporated by reference.

[0121] In some embodiments, the modified human TNFα signaling agent has mutations that provide receptor selectivity as described in PCT/IB2016/001668, the entire contents of which are hereby incorporated by reference. In some embodiments, the mutations to TNFα are TNF-R1 selective. In some embodiments, the mutations to TNFα which are TNF-R1 selective are at one or more of positions R32, S86, and E146. In some embodiments, the mutations to TNFα which are TNF-R1 selective are one or more of R32W, S86T, and E146K. In some embodiments, the mutations to TNFα which are TNF-R1 selective are one or more of R32W, R32W/S86T, R32W/E146K and E146K. In some embodiments, the mutations to TNFα are TNF-R2 selective. In some embodiments, the mutations to TNFα which are TNF-R2 selective are at one or more of positions A145, E146, and S147. In some embodiments, the mutations to TNFα which are TNF-R2 selective are one or more of A145T, A145R, E146D, and S147D. In some embodiments, the mutations to TNFα which are TNF-R2 selective are one or more of A145R, A145T/S147D, and A145T/E146D/S147D.

[0122] In some embodiments, the TNFα signaling agent of the present invention has the same mutation/modification at all of its monomers or has a monomer having a different mutation than other monomers or has all monomers having different mutations.

### Targeting Moieties (TM)

[0123] In some embodiments, the Fc-based chimeric proteins of the present invention include a targeting moiety comprising a recognition domain that recognizes and/or binds to a target. The Fc-based chimeric proteins can include one or more targeting moieties. For example, in some embodiments, the Fc-based chimeric protein include one targeting moiety and one human IFNγ or human TNFα signaling agent. In other embodiments, the Fc-based chimeric protein includes two or more targeting moieties and one human IFNγ or human TNFα signaling agent. In other embodiments, the Fc-based chimeric protein includes two or more targeting moieties and two or more human IFNγ or human TNFα signaling agents.

[0124] In some embodiments, the Fc-based chimeric proteins disclosed herein include a multimeric targeting moiety wherein the Fc chain of the Fc domain includes at least one monomer of the multimeric targeting moiety and the other Fc chain of the Fc domain includes other monomer(s) of the multimeric targeting moiety. These Fc chains assemble to form the Fc domain such that the multimeric targeting moiety is reconstituted upon the assembly and the targeting moiety becomes functional. The reconstitution of the multimeric targeting moiety allows for it to bind to its target.

[0125] In some embodiments, the Fc-based chimeric proteins disclosed herein include a first momomeric targeting moiety and a second multimeric targeting moiety wherein a first Fc chain includes at least one monomer of the second multimeric targeting moiety and the first monomeric targeting moiety and the second Fc chain includes other monomer(s) of the second multimeric targeting moiety. These Fc chains assemble to form the Fc domain such that the second multimeric targeting moiety is reconstituted upon the assembly and the targeting moiety becomes functional. The reconstitution of the multimeric targeting moiety allows for it to bind to its target.

[0126] In some embodiments, the Fc-based chimeric proteins disclosed herein include a multimeric targeting moiety and a multimeric human IFNγ or human TNFα signaling agent. These chimeric protein include a first Fc chain that includes at least one monomer of the multimeric targeting moiety and at least one monomer of the multimeric human IFNγ or human TNFα signaling agent and a second Fc chain that includes other monomer(s) of the multimeric targeting moiety and the human IFNγ or human TNFα signaling agent. These Fc chains assemble to form the Fc domain such that the multimeric targeting moiety as well as the multimeric human IFNγ or human TNFα signaling agent is reconstituted upon the assembly of the Fc domain and the targeting moiety and the human IFNγ or human TNFα signaling agent becomes functional. Such reconstitution of the multimeric targeting moiety allows for it to bind to its target and the human IFNγ or human TNFα signaling agent to function.

[0127] In some embodiments, the Fc-based chimeric proteins disclosed herein include a targeting moiety and a human IFNγ or human TNFα signaling agent that is functional as a multimer of monomers and the two Fc chains each comprises one or more of human IFNγ or human TNFα signaling agent's monomers such that the functional multimer of monomers of the human IFNγ or human TNFα signaling agent is reconstituted upon association of the two Fc chains.

[0128] In some embodiments, the Fc-based chimeric protein complex disclosed herein includes a targeting moiety that is a dimeric targeting moiety and each monomer is linked to different Fc-chains. In other embodiments, the Fc-based chimeric protein complex of the present invention includes a targeting moiety that is a trimeric targeting moiety and two monomers of the targeting moiety are linked to a first Fc-chain and one monomer is linked to a second Fc-chain.

[0129] In some embodiments, the targeting moiety is a protein-based agent capable of specific binding, such as an antibody or derivatives thereof.

[0130] In some embodiments, the targeting moiety comprises antibody derivatives or formats. In some embodiments, the targeting moiety of the present Fc-based chimeric protein complex is a single-domain antibody, a recombinant heavy-chain-only antibody (VHH), a single-chain antibody (scFv), a shark heavy-chain-only antibody (VNAR), a microprotein (cysteine knot protein, knottin), a DARPin; a Tetranectin; an Affibody; a Transbody; an Anticalin; an AdNectin; an Affilin; a Microbody; a peptide aptamer; an alterases; a plastic antibodies; a phylomer; a stradobodies; a maxibodies; an evibody; a fynomer, an armadillo repeat protein, a Kunitz domain, an avimer, an atrimer, a probody, an immunobody, a triomab, a troybody; a pepbody; a vaccibody, a UniBody; affimers, a DuoBody, a Fv, a Fab, a Fab′, a F(ab′)₂, a peptide mimetic molecule, or a small (e.g. synthetic or natural) molecule, e.g. without limitation, as described in US patent Nos. or Patent Publication Nos. U.S. Pat. No. 7,417,130, US 2004/132094, U.S. Pat. No. 5,831,012, US 2004/023334, U.S. Pat. Nos. 7,250,297, 6,818,418, US 2004/209243, U.S. Pat. Nos. 7,838,629, 7,186,524, 6,004,746, 5,475,096, US 2004/146938, US 2004/157209, U.S. Pat. Nos. 6,994,982, 6,794,144, US 2010/239633, U.S. Pat. No. 7,803,907, US 2010/119446, and/or U.S. Pat. No. 7,166,697, the contents of which are hereby incorporated by reference in their entireties. See also, Storz MAbs. 2011 May-June; 3(3): 310-317.

[0131] In one embodiment, the targeting moiety comprises a single-domain antibody, such as VHH from, for example, an organism that produces VHH antibody such as a camelid, a shark, or a designed VHH. VHHs are antibody-derived therapeutic proteins that contain the unique structural and functional properties of naturally-occurring heavy-chain antibodies. VHH technology is based on fully functional antibodies from camelids that lack light chains. These heavy-chain antibodies contain a single variable domain (VHH) and two constant domains (CH2 and CH3).

[0132] In an embodiment, the targeting moiety comprises a VHH. In some embodiments, the VHH is a humanized VHH or camelized VHH.

[0133] In some embodiments, the VHH comprises a fully human VH domain, e.g. a HUMABODY (Crescendo Biologics, Cambridge, UK). In some embodiments, fully human VH domain, e.g. a HUMABODY is monovalent, bivalent, or trivalent. In some embodiments, the fully human VH domain, e.g. a HUMABODY is mono- or multi-specific such as monospecific, bispecific, or trispecific. Illustrative fully human VH domains, e.g. HUMABODIES are described in, for example, WO 2016/113555 and WO2016/113557, the entire disclosure of which is incorporated by reference.

[0134] In various embodiments, the target (e.g. antigen, receptor) of interest can be found on one or more immune cells, which can include, without limitation, T cells, cytotoxic T lymphocytes, T helper cells, natural killer (NK) cells, natural killer T (NKT) cells, anti-tumor macrophages (e.g. M1 macrophages), B cells, dendritic cells, or subsets thereof. In some embodiments, the recognition domains specifically bind to a target (e.g. antigen, receptor) of interest and effectively, directly or indirectly, recruit one of more immune cells. In some embodiments, the target (e.g. antigen, receptor) of interest can be found on one or more tumor cells. In some embodiments, the present Fc-based chimeric protein complexes may directly or indirectly recruit an immune cell, e.g., in some embodiments, to a therapeutic site (e.g. a locus with one or more disease cell or cell to be modulated for a therapeutic effect). In some embodiments, the present Fc-based chimeric protein complexes may directly or indirectly recruit an immune cell, e.g. an immune cell that can kill and/or suppress a tumor cell, to a site of action (such as, by way of non-limiting example, the tumor microenvironment).

[0135] In various embodiments, the targeting moieties can directly or indirectly recruit cells, such as disease cells and/or effector cells. In some embodiments, the present Fc-based chimeric protein complexes are capable of, or find use in methods involving, shifting the balance of immune cells in favor of immune attack of a tumor. For instance, the present Fc-based chimeric protein complexes can shift the ratio of immune cells at a site of clinical importance in favor of cells that can kill and/or suppress a tumor (e.g. T cells, cytotoxic T lymphocytes, T helper cells, natural killer (NK) cells, natural killer T (NKT) cells, anti-tumor macrophages (e.g. M1 macrophages), B cells, dendritic cells, or subsets thereof) and in opposition to cells that protect tumors (e.g. myeloid-derived suppressor cells (MDSCs), regulatory T cells (Tregs); tumor associated neutrophils (TANs), M2 macrophages, tumor associated macrophages (TAMs), or subsets thereof). In some embodiments, the present Fc-based chimeric protein complex is capable of increasing a ratio of effector T cells to regulatory T cells.

[0136] For example, in some embodiments, the recognition domains specifically bind to a target (e.g. antigen, receptor) associated with T cells. In some embodiments, the recognition domains directly or indirectly recruit T cells. In an embodiment, the recognition domains specifically bind to effector T cells. In some embodiments, the recognition domain directly or indirectly recruits effector T cells, e.g., in some embodiments, to a therapeutic site (e.g. a locus with one or more disease cell or cell to be modulated for a therapeutic effect). Illustrative effector T cells include cytotoxic T cells (e.g. αβ TCR, CD3⁺, CD8⁺, CD45RO⁺); CD4⁺ effector T cells (e.g. αβ TCR, CD3⁺, CD4⁺, CCR7⁺, CD62Lhi, IL-7R/CD127⁺); CD8⁺ effector T cells (e.g. αβ TCR, CD3⁺, CD8⁺, CCR7⁺, CD62Lhi, IL-7R/CD127⁺); effector memory T cells (e.g. CD62Llow, CD44⁺, TCR, CD3⁺, IL-7R/CD127⁺, IL-15R⁺, CCR7low); central memory T cells (e.g. CCR7⁺, CD62L⁺, CD27⁺; or CCR7hi, CD44⁺, CD62Lhi, TCR, CD3⁺, IL-7R/CD127⁺, IL-15R⁺); CD62L⁺ effector T cells; CD8⁺ effector memory T cells (TEM) including early effector memory T cells (CD27⁺CD62L⁻) and late effector memory T cells (CD27⁻ CD62L⁻) (TemE and TemL, respectively); CD127(⁺)CD25(low/−) effector T cells; CD127(⁻)CD25(⁻) effector T cells; CD8⁺ stem cell memory effector cells (TSCM) (e.g. CD44(low)CD62L(high)CD122(high)sca(⁺)); TH1 effector T-cells (e.g. CXCR3⁺, CXCR6⁺ and CCR5⁺; or αβ TCR, CD3⁺, CD4⁺, IL-12R⁺, IFNγR⁺, CXCR3⁺), TH2 effector T cells (e.g. CCR3⁺, CCR4⁺ and CCR8⁺; or αβ TCR, CD3⁺, CD4⁺, IL-4R⁺, IL-33R⁺, CCR4⁺, IL-17RB⁺, CRTH2⁺); TH9 effector T cells (e.g. αβ TCR, CD3⁺, CD4⁺); TH17 effector T cells (e.g. αβ TCR, CD3⁺, CD4⁺, IL-23R⁺, CCR6⁺, IL-1R⁺); CD4⁺CD45RO⁺CCR7⁺ effector T cells, ICOS⁺ effector T cells; CD4⁺CD45RO⁺CCR7(⁻) effector T cells; and effector T cells secreting IL-2, IL-4 and/or IFN-γ.

[0137] Illustrative T cell antigens of interest include, for example (and inclusive of the extracellular domains, where applicable): CD8, CD3, SLAMF4, IL-2Rα, 4-1BB/TNFRSF9, IL-2 R β, ALCAM, B7-1, IL-4 R, B7-H3, BLAME/SLAMFS, CEACAM1, IL-6 R, CCR3, IL-7 Ra, CCR4, CXCRI/IL-S RA, CCR5, CCR6, IL-10R α, CCR 7, IL-1 0 R β, CCRS, IL-12 R β1, CCR9, IL-12 R β2, CD2, IL-13 R α 1, IL-13, CD3, CD4, ILT2/CDS5j, ILT3/CDS5k, ILT4/CDS5d, ILT5/CDS5a, lutegrin α 4/CD49d, CDS, Integrin α E/CD103, CD6, Integrin α M/CD 11 b, CDS, Integrin α X/CD11c, Integrin β 2/CDIS, KIR/CD15S, CD27/TNFRSF7, KIR2DL1, CD2S, KIR2DL3, CD30/TNFRSFS, KIR2DL4/CD15Sd, CD31/PECAM-1, KIR2DS4, CD40 Ligand/TNFSF5, LAG-3, CD43, LAIR1, CD45, LAIR2, CDS3, Leukotriene B4-R1, CDS4/SLAMF5, NCAM-L1, CD94, NKG2A, CD97, NKG2C, CD229/SLAMF3, NKG2D, CD2F-10/SLAMF9, NT-4, CD69, NTB-A/SLAMF6, Common γ Chain/IL-2 R γ, Osteopontin, CRACC/SLAMF7, PD-1, CRTAM, PSGL-1, CTLA-4, RANK/TNFRSF11A, CX3CR1, CX3CL1, L-Selectin, CXCR3, SIRP β 1, CXCR4, SLAM, CXCR6, TCCR/WSX-1, DNAM-1, Thymopoietin, EMMPRIN/CD147, TIM-1, EphB6, TIM-2, Fas/TNFRSF6, TIM-3, Fas Ligand/TNFSF6, TIM-4, Fcγ RIII/CD16, TIM-6, TNFR1/TNFRSF1A, Granulysin, TNF RIII/TNFRSF1B, TRAIL RI/TNFRSFIOA, ICAM-1/CD54, TRAIL R2/TNFRSF10B, ICAM-2/CD102, TRAILR3/TNFRSF10C, IFN-γ R1, TRAILR4/TNFRSF10D, IFN-γ R2, TSLP, IL-1 R1 and TSLP R. In various embodiments, a targeting moiety of the Fc-based chimeric protein complex binds one or more of these illustrative T cell antigens.

[0138] In various embodiments, the targeting moiety of the present Fc-based chimeric protein complex is a protein-based agent capable of specific binding to a cell receptor, such as a natural ligand for the cell receptor. In various embodiments, the cell receptor is found on one or more immune cells, which can include, without limitation, T cells, cytotoxic T lymphocytes, T helper cells, natural killer (NK) cells, natural killer T (NKT) cells, anti-tumor macrophages (e.g. M1 macrophages), B cells, dendritic cells, or subsets thereof. In some embodiments, the cell receptor is found on megakaryocytes, thrombocytes, erythrocytes, mast cells, basophils, neutrophils, eosinophils, or subsets thereof.

[0139] In some embodiments, the targeting moiety is a natural ligand such as a chemokine. Exemplary chemokines that may be included in the Fc-based chimeric protein complex of the invention include, but are not limited to, CCL1, CCL2, CCL4, CCL5, CCL6, CCL7, CCL8, CCL9, CCL10, CCL1, CCL12, CCL13, CCL14, CCL15, CCL16, CL17, CCL18, CCL19, CCL20, CCL21, CCL22, CCL23, CCL24, CLL25, CCL26, CCL27, CXCL1, CXCL2, CXCL3, CXCL4, CXCL5, CXCL6, CXCL7, CXCL8, CXCL9, CXCL10, CXCL11, CXCL12, CXCL13, CXCL14, CXCL15, CXCL16, CXCL17, XCL1, XCL2, CX3CL1, HCC-4, and LDGF-PBP. In an illustrative embodiment, the targeting moiety may be XCL1 OR XCL2 which is a chemokine that recognizes and binds to the dendritic cell receptor XCR1. In another illustrative embodiment, the targeting moiety is CCL1, which is a chemokine that recognizes and binds to CCR8. In another illustrative embodiment, the targeting moiety is CCL2, which is a chemokine that recognizes and binds to CCR2 or CCR9. In another illustrative embodiment, the targeting moiety is CCL3, which is a chemokine that recognizes and binds to CCR1, CCR5, or CCR9. In another illustrative embodiment, the targeting moiety is CCL4, which is a chemokine that recognizes and binds to CCR1 or CCR5 or CCR9. In another illustrative embodiment, the targeting moiety is CCL5, which is a chemokine that recognizes and binds to CCR1 or CCR3 or CCR4 or CCR5. In another illustrative embodiment, the targeting moiety is CCL6, which is a chemokine that recognizes and binds to CCR1. In another illustrative embodiment, the targeting moiety is CCL7, which is a chemokine that recognizes and binds to CCR2 or CCR9. In another illustrative embodiment, the targeting moiety is CCL8, which is a chemokine that recognizes and binds to CCR1 or CCR2 or CCR2B or CCR5 or CCR9. In another illustrative embodiment, the targeting moiety is CCL9, which is a chemokine that recognizes and binds to CCR1. In another illustrative embodiment, the targeting moiety is CCL10, which is a chemokine that recognizes and binds to CCR1. In another illustrative embodiment, the targeting moiety is CCL 1, which is a chemokine that recognizes and binds to CCR2 or CCR3 or CCR5 or CCR9. In another illustrative embodiment, the targeting moiety is CCL13, which is a chemokine that recognizes and binds to CCR2 or CCR3 or CCR5 or CCR9. In another illustrative embodiment, the targeting moiety is CCL14, which is a chemokine that recognizes and binds to CCR1 or CCR9. In another illustrative embodiment, the targeting moiety is CCL15, which is a chemokine that recognizes and binds to CCR1 or CCR3. In another illustrative embodiment, the targeting moiety is CCL16, which is a chemokine that recognizes and binds to CCR1, CCR2, CCR5, or CCR8. In another illustrative embodiment, the targeting moiety is CCL17, which is a chemokine that recognizes and binds to CCR4. In another illustrative embodiment, the targeting moiety is CCL19, which is a chemokine that recognizes and binds to CCR7. In another illustrative embodiment, the targeting moiety is CCL20, which is a chemokine that recognizes and binds to CCR6. In another illustrative embodiment, the targeting moiety is CCL21, which is a chemokine that recognizes and binds to CCR7. In another illustrative embodiment, the targeting moiety is CCL22, which is a chemokine that recognizes and binds to CCR4. In another illustrative embodiment, the targeting moiety is CCL23, which is a chemokine that recognizes and binds to CCR1. In another illustrative embodiment, the targeting moiety is CCL24, which is a chemokine that recognizes and binds to CCR3. In another illustrative embodiment, the targeting moiety is CCL25, which is a chemokine that recognizes and binds to CCR9. In another illustrative embodiment, the targeting moiety is CCL26, which is a chemokine that recognizes and binds to CCR3. In another illustrative embodiment, the targeting moiety is CCL27, which is a chemokine that recognizes and binds to CCR10. In another illustrative embodiment, the targeting moiety is CCL28, which is a chemokine that recognizes and binds to CCR3 or CCR10. In another illustrative embodiment, the targeting moiety is CXCL1, which is a chemokine that recognizes and binds to CXCR1 or CXCR2. In another illustrative embodiment, the targeting moiety is CXCL2, which is a chemokine that recognizes and binds to CXCR2. In another illustrative embodiment, the targeting moiety is CXCL3, which is a chemokine that recognizes and binds to CXCR2. In another illustrative embodiment, the targeting moiety is CXCL4, which is a chemokine that recognizes and binds to CXCR3B. In another illustrative embodiment, the targeting moiety is CXCL5, which is a chemokine that recognizes and binds to CXCR2. In another illustrative embodiment, the targeting moiety is CXCL6, which is a chemokine that recognizes and binds to CXCR1 or CXCR2.

[0140] In another illustrative embodiment, the targeting moiety is CXCL8, which is a chemokine that recognizes and binds to CXCR1 or CXCR2. In another illustrative embodiment, the targeting moiety is CXCL9, which is a chemokine that recognizes and binds to CXCR3. In another illustrative embodiment, the targeting moiety is CXCL10, which is a chemokine that recognizes and binds to CXCR3. In another illustrative embodiment, the targeting moiety is CXCL11, which is a chemokine that recognizes and binds to CXCR3 or CXCR7. In another illustrative embodiment, the targeting moiety is CXCL12, which is a chemokine that recognizes and binds to CXCR4 or CXCR7. In another illustrative embodiment, the targeting moiety is CXCL13, which is a chemokine that recognizes and binds to CXCR5. In another illustrative embodiment, the targeting moiety is CXCL16, which is a chemokine that recognizes and binds to CXCR6. In another illustrative embodiment, the targeting moiety is LDGF-PBP, which is a chemokine that recognizes and binds to CXCR2. In another illustrative embodiment, the targeting moiety is XCL2, which is a chemokine that recognizes and binds to XCR1. In another illustrative embodiment, the targeting moiety is CX3CL1, which is a chemokine that recognizes and binds to CX3CR1.

[0141] In some embodiments, the targeting moiety is a natural ligand such as Flt3 or a truncated region thereof. In some embodiments, the targeting moiety is an extracellular domain of Flt3, or a functional portion thereof (e.g. one that is still able to bind the cognate ligand or receptor).

[0142] Functional equivalent of extracellular domains of natural ligands encompass N-terminal and/or C-terminally shortened versions that retain the binding capacitiy of the full-length extracellular domains.

[0143] In some embodiments, the targeting moiety is a NGR peptide or a truncated region thereof.

[0144] By way of non-limiting example, in various embodiments, the present Fc-based chimeric protein complex has a targeting moiety directed against a checkpoint marker expressed on a T cell, e.g. one or more of PD-1, CD28, CTLA4, ICOS, BTLA, KIR, LAG3, CD137, OX40, CD27, CD40L, TIM3, and A2aR.

[0145] In some embodiments, the targeting moiety is an extracellular domain of PD-1, PD-L1, or PD-L2, or a functional portion thereof (e.g. one that is still able to bind the cognate ligand or receptor).

[0146] For example, in some embodiments, the recognition domains specifically bind to a target (e.g. antigen, receptor) associated with B cells. In some embodiments, the recognition domains directly or indirectly recruit B cells, e.g., in some embodiments, to a therapeutic site (e.g. a locus with one or more disease cell or cell to be modulated for a therapeutic effect). Illustrative B cell antigens of interest include, for example, CD10, CD19, CD20, CD21, CD22, CD23, CD24, CD37, CD38, CD39, CD40, CD70, CD72, CD73, CD74, CDw75, CDw76, CD77, CD78, CD79a/b, CD80, CD81, CD82, CD83, CD84, CD85, CD86, CD89, CD98, CD126, CD127, CDw130, CD138, CDw150, and B-cell maturation antigen (BCMA). In various embodiments, a targeting moiety of the Fc-based chimeric protein complex binds one or more of these illustrative B cell antigens.

[0147] By way of further example, in some embodiments, the recognition domains specifically bind to a target (e.g. antigen, receptor) associated with Natural Killer cells. In some embodiments, the recognition domains directly or indirectly recruit Natural Killer cells, e.g., in some embodiments, to a therapeutic site (e.g. a locus with one or more disease cell or cell to be modulated for a therapeutic effect). Illustrative Natural Killer cell antigens of interest include, for example TIGIT, 2B4/SLAMF4, KIR2DS4, CD155/PVR, KIR3DL1, CD94, LMIR1/CD300A, CD69, LMIR2/CD300c, CRACC/SLAMF7, LMIR3/CD300LF, DNAM-1, LMIR5/CD300LB, Fc-epsilon RII, LMIR6/CD300LE, Fc-γ RI/CD64, MICA, Fc-γ RIIB/CD32b, MICB, Fc-γ RIIC/CD32c, MULT-1, Fc-γ RIIA/CD32a, Nectin-2/CD112, Fc-γ RIII/CD16, NKG2A, FcRH1/IRTA5, NKG2C, FcRH2/IRTA4, NKG2D, FcRH4/IRTA1, NKp30, FcRH5/IRTA2, NKp44, Fc-Receptor-like 3/CD16-2, NKp46/NCR1, NKp80/KLRF1, NTB-A/SLAMF6, Rae-1, Rae-1 α, Rae-1 β, Rae-1 delta, H60, Rae-1 epsilon, ILT2/CD85j, Rae-1 γ, ILT3/CD85k, TREM-1, ILT4/CD85d, TREM-2, ILT5/CD85a, TREM-3, KIR/CD158, TREML1/TLT-1, KIR2DL1, ULBP-1, KIR2DL3, ULBP-2, KIR2DL4/CD158d and ULBP-3. In various embodiments, a targeting moiety of the Fc-based chimeric protein complex binds one or more of these illustrative NK cell antigens.

[0148] Also, in some embodiments, the recognition domains specifically bind to a target (e.g. antigen, receptor) associated with macrophages/monocytes. In some embodiments, the recognition domains directly or indirectly recruit macrophages/monocytes, e.g., in some embodiments, to a therapeutic site (e.g. a locus with one or more disease cell or cell to be modulated for a therapeutic effect). Illustrative macrophages/monocyte antigens of interest include, for example SIRP1a, B7-1/CD80, ILT4/CD85d, B7-H1, ILT5/CD85a, Common β Chain, Integrin α 4/CD49d, BLAME/SLAMF8, Integrin α X/CDIIc, CCL6/C10, Integrin β 2/CD18, CD155/PVR, Integrin β 3/CD61, CD31/PECAM-1, Latexin, CD36/SR-B3, Leukotriene B4 R1, CD40/TNFRSF5, LIMPIIISR-B2, CD43, LMIR1/CD300A, CD45, LMIR2/CD300c, CD68, LMIR3/CD300LF, CD84/SLAMF5, LMIR5/CD300LB, CD97, LMIR6/CD300LE, CD163, LRP-1, CD2F-10/SLAMF9, MARCO, CRACC/SLAMF7, MD-1, ECF-L, MD-2, EMMPRIN/CD147, MGL2, Endoglin/CD105, Osteoactivin/GPNMB, Fc-γ RI/CD64, Osteopontin, Fc-γ RIIB/CD32b, PD-L2, Fc-γ RIIC/CD32c, Siglec-3/CD33, Fc-γ RIIA/CD32a, SIGNR1/CD209, Fc-γ RIII/CD16, SLAM, GM-CSF R α, TCCR/WSX-1, ICAM-2/CD102, TLR3, IFN-γ RI, TLR4, IFN-γ R2, TREM-1, IL-I RII, TREM-2, ILT2/CD85j, TREM-3, ILT3/CD85k, TREML1/TLT-1, 2B4/SLAMF 4, IL-10 R α, ALCAM, IL-10 R β, AminopeptidaseN/ANPEP, ILT2/CD85j, Common β Chain, ILT3/CD85k, C1q R1/CD93, ILT4/CD85d, CCR1, ILT5/CD85a, CCR2, Integrin α 4/CD49d, CCR5, Integrin α M/CDII b, CCR8, Integrin α X/CDIIc, CD155/PVR, Integrin β 2/CD18, CD14, Integrin β 3/CD61, CD36/SR-B3, LAIR1, CD43, LAIR2, CD45, Leukotriene B4-R1, CD68, LIMPIIISR-B2, CD84/SLAMF5, LMIR1/CD300A, CD97, LMIR2/CD300c, LMIR3/CD300LF, Coagulation Factor Ill/Tissue Factor, LMIR5/CD300LB, CX3CR1, CX3CL1, LMIR6/CD300LE, CXCR4, LRP-1, CXCR6, M-CSF R, DEP-1/CD148, MD-1, DNAM-1, MD-2, EMMPRIN/CD147, MMR, Endoglin/CD105, NCAM-L1, Fc-γ RI/CD64, PSGL-1, Fc-γ RIIIICD16, RP105, G-CSF R, L-Selectin, GM-CSF R α, Siglec-3/CD33, HVEM/TNFRSF14, SLAM, ICAM-1/CD54, TCCR/WSX-1, ICAM-2/CD102, TREM-I, IL-6 R, TREM-2, CXCRI/IL-8 RA, TREM-3 and TREMLI/TLT-1. In various embodiments, a targeting moiety of the Fc-based chimeric protein complex binds one or more of these illustrative macrophage/monocyte antigens.

[0149] Also, in some embodiments, the recognition domains specifically bind to a target (e.g. antigen, receptor) associated with dendritic cells. In some embodiments, the recognition domains directly or indirectly recruit dendritic cells, e.g., in some embodiments, to a therapeutic site (e.g. a locus with one or more disease cell or cell to be modulated for a therapeutic effect). Illustrative dendritic cell antigens of interest include, for example, CLEC9A, XCR1, RANK, CD36/SRB3, LOX-1/SR-E1, CD68, MARCO, CD163, SR-A1/MSR, CD5L, SREC-1, CL-PI/COLEC12, SREC-II, LIMPIIISRB2, RP105, TLR4, TLR1, TLR5, TLR2, TLR6, TLR3, TLR9, 4-IBB Ligand/TNFSF9, IL-12/IL-23 p40, 4-Amino-1,8-naphthalimide, ILT2/CD85j, CCL21/6Ckine, ILT3/CD85k, 8-oxo-dG, ILT4/CD85d, 8D6A, ILT5/CD85a, A2B5, lutegrin α 4/CD49d, Aag, Integrin β 2/CD18, AMICA, Langerin, B7-2/CD86, Leukotriene B4 RI, B7-H3, LMIR1/CD300A, BLAME/SLAMF8, LMIR2/CD300c, C1q R1/CD93, LMIR3/CD300LF, CCR6, LMIR5/CD300LB CCR7, LMIR6/CD300LE, CD40/TNFRSF5, MAG/Siglec-4-a, CD43, MCAM, CD45, MD-1, CD68, MD-2, CD83, MDL-1/CLEC5A, CD84/SLAMF5, MMR, CD97, NCAMLI, CD2F-10/SLAMF9, Osteoactivin GPNMB, Chern 23, PD-L2, CLEC-1, RP105, CLEC-2, CLEC-8, Siglec-2/CD22, CRACC/SLAMF7, Siglec-3/CD33, DC-SIGN, Siglec-5, DC-SIGNR/CD299, Siglec-6, DCAR, Siglec-7, DCIR/CLEC4A, Siglec-9, DEC-205, Siglec-10, Dectin-1/CLEC7A, Siglec-F, Dectin-2/CLEC6A, SIGNR1/CD209, DEP-1/CD148, SIGNR4, DLEC, SLAM, EMMPRIN/CD147, TCCR/WSX-1, Fc-γ R1/CD64, TLR3, Fc-γ RIIB/CD32b, TREM-1, Fc-γ RIIC/CD32c, TREM-2, Fc-γ RIIA/CD32a, TREM-3, Fc-γ RIII/CD16, TREML1/TLT-1, ICAM-2/CD102 and Vanilloid R1. In various embodiments, a targeting moiety of the Fc-based chimeric protein complex binds one or more of these illustrative DC antigens.

[0150] In some embodiments, the recognition domains specifically bind to a target (e.g. antigen, receptor) on immune cells selected from, but not limited to, megakaryocytes, thrombocytes, erythrocytes, mast cells, basophils, neutrophils, eosinophils, or subsets thereof. In some embodiments, the recognition domains directly or indirectly recruit megakaryocytes, thrombocytes, erythrocytes, mast cells, basophils, neutrophils, eosinophils, or subsets thereof, e.g., in some embodiments, to a therapeutic site (e.g. a locus with one or more disease cell or cell to be modulated for a therapeutic effect).

[0151] In some embodiments, the recognition domains specifically bind to a target (e.g. antigen, receptor) associated with megakaryocytes and/or thrombocytes. Illustrative megakaryocyte and/or thrombocyte antigens of interest include, for example, GP IIb/IIIa, GPIb, vWF, PF4, and TSP. In various embodiments, a targeting moiety of the Fc-based chimeric protein complex binds one or more of these illustrative megakaryocyte and/or thrombocyte antigens.

[0152] In some embodiments, the recognition domains specifically bind to a target (e.g. antigen, receptor) associated with erythrocytes. Illustrative erythrocyte antigens of interest include, for example, CD34, CD36, CD38, CD41a (platelet glycoprotein IIb/IIIa), CD41b (GPIIb), CD71 (transferrin receptor), CD105, glycophorin A, glycophorin C, c-kit, HLA-DR, H2 (MHC-II), and Rhesus antigens. In various embodiments, a targeting moiety of the Fc-based chimeric protein complex binds one or more of these illustrative erythrocyte antigens.

[0153] In some embodiments, the recognition domains specifically bind to a target (e.g. antigen, receptor) associated with mast cells. Illustrative mast cells antigens of interest include, for example, SCFR/CD117, Fc_{ε}RI, CD2, CD25, CD35, CD88, CD203c, C5R1, CMAI, FCERIA, FCER2, TPSABI. In various embodiments, a targeting moiety of the Fc-based chimeric protein complex binds one or more of these mast cell antigens.

[0154] In some embodiments, the recognition domains specifically bind to a target (e.g. antigen, receptor) associated with basophils. Illustrative basophils antigens of interest include, for example, Fc_{ε}RI, CD203c, CD123, CD13, CD107a, CD107b, and CD164. In various embodiments, a targeting moiety of the Fc-based chimeric protein complex binds one or more of these basophil antigens.

[0155] In some embodiments, the recognition domains specifically bind to a target (e.g. antigen, receptor) associated with neutrophils. Illustrative neutrophils antigens of interest include, for example, 7D5, CD10/CALLA, CD13, CD16 (FcRIII), CD18 proteins (LFA-1, CR3, and p150, 95), CD45, CD67, and CD177. In various embodiments, a targeting moiety of the Fc-based chimeric protein complex binds one or more of these neutrophil antigens.

[0156] In some embodiments, the recognition domains specifically bind to a target (e.g. antigen, receptor) associated with eosinophils. Illustrative eosinophils antigens of interest include, for example, CD35, CD44 and CD69. In various embodiments, a targeting moiety of the Fc-based chimeric protein complex binds one or more of these eosinophil antigens.

[0157] In various embodiments, the recognition domain may bind to any appropriate target, antigen, receptor, or cell surface markers known by the skilled artisan. In some embodiments, the antigen or cell surface marker is a tissue-specific marker. Illustrative tissue-specific markers include, but are not limited to, endothelial cell surface markers such as ACE, CD14, CD34, CDH5, ENG, ICAM2, MCAM, NOS3, PECAMI, PROCR, SELE, SELP, TEK, THBD, VCAMI, VWF; smooth muscle cell surface markers such as ACTA2, MYHIO, MYHI 1, MYH9, MYOCD; fibroblast (stromal) cell surface markers such as ALCAM, CD34, COLIAI, COL1A2, COL3A1, FAP, PH-4; epithelial cell surface markers such as CDID, K6IRS2, KRTIO, KRT13, KRT17, KRT18, KRT19, KRT4, KRT5, KRT8, MUCI, TACSTDI; neovasculature markers such as CD13, TFNA, Alpha-v beta-3 (av3₃), E-selectin; and adipocyte surface markers such as ADIPOQ, FABP4, and RETN. In various embodiments, a targeting moiety of the Fc-based chimeric protein complex binds one or more of these antigens. In various embodiments, a targeting moiety of the Fc-based chimeric protein complex binds one or more of cells having these antigens.

[0158] In some embodiments, the recognition domains specifically bind to a target (e.g. antigen, receptor) associated with tumor cells. In some embodiments, the recognition domains directly or indirectly recruit tumor cells. For instance, in some embodiments, the direct or indirect recruitment of the tumor cell is to one or more effector cell (e.g. an immune cell as described herein) that can kill and/or suppress the tumor cell.

[0159] Tumor cells or cancer cells refer to an uncontrolled growth of cells or tissues and/or an abnormal increase in cell survival and/or inhibition of apoptosis which interferes with the normal functioning of bodily organs and systems. For example, tumor cells include benign and malignant cancers, polyps, hyperplasia, as well as dormant tumors or micrometastases. Illustrative tumor cells include, but are not limited to cells of: basal cell carcinoma, biliary tract cancer; bladder cancer; bone cancer; brain and central nervous system cancer; breast cancer; cancer of the peritoneum; cervical cancer; choriocarcinoma; colon and rectum cancer; connective tissue cancer; cancer of the digestive system; endometrial cancer; esophageal cancer; eye cancer; cancer of the head and neck; gastric cancer (including gastrointestinal cancer); glioblastoma; hepatic carcinoma; hepatoma; intra-epithelial neoplasm; kidney or renal cancer; larynx cancer; leukemia; liver cancer; lung cancer (e.g., small-cell lung cancer, non-small cell lung cancer, adenocarcinoma of the lung, and squamous carcinoma of the lung); melanoma; myeloma; neuroblastoma; oral cavity cancer (lip, tongue, mouth, and pharynx); ovarian cancer; pancreatic cancer; prostate cancer; retinoblastoma; rhabdomyosarcoma; rectal cancer; cancer of the respiratory system; salivary gland carcinoma; sarcoma; skin cancer; squamous cell cancer; stomach cancer; testicular cancer; thyroid cancer; uterine or endometrial cancer; cancer of the urinary system; vulval cancer; lymphoma including Hodgkin's and non-Hodgkin's lymphoma, as well as B-cell lymphoma (including low grade/follicular non-Hodgkin's lymphoma (NHL); small lymphocytic (SL) NHL; intermediate grade/follicular NHL; intermediate grade diffuse NHL; high grade immunoblastic NHL; high grade lymphoblastic NHL; high grade small non-cleaved cell NHL; bulky disease NHL; mantle cell lymphoma; AIDS-related lymphoma; and Waldenstrom's Macroglobulinemia; chronic lymphocytic leukemia (CLL); acute lymphoblastic leukemia (ALL); Hairy cell leukemia; chronic myeloblastic leukemia; as well as other carcinomas and sarcomas; and post-transplant lymphoproliferative disorder (PTLD), as well as abnormal vascular proliferation associated with phakomatoses, edema (e.g. that associated with brain tumors), and Meigs' syndrome.

[0160] Tumor cells, or cancer cells also include, but are not limited to, carcinomas, e.g. various subtypes, including, for example, adenocarcinoma, basal cell carcinoma, squamous cell carcinoma, and transitional cell carcinoma), sarcomas (including, for example, bone and soft tissue), leukemias (including, for example, acute myeloid, acute lymphoblastic, chronic myeloid, chronic lymphocytic, and hairy cell), lymphomas and myelomas (including, for example, Hodgkin and non-Hodgkin lymphomas, light chain, non-secretory, MGUS, and plasmacytomas), and central nervous system cancers (including, for example, brain (e.g. gliomas (e.g. astrocytoma, oligodendroglioma, and ependymoma), meningioma, pituitary adenoma, and neuromas, and spinal cord tumors (e.g. meningiomas and neurofibroma).

[0161] Illustrative tumor antigens include, but are not limited to, MART-1/Melan-A, gp100, Dipeptidyl peptidase IV (DPPIV), adenosine deaminase-binding protein (ADAbp), cyclophilin b, Colorectal associated antigen (CRC)-0017-1A/GA733, Carcinoembryonic Antigen (CEA) and its immunogenic epitopes CAP-1 and CAP-2, etv6, aml1, Prostate Specific Antigen (PSA) and its immunogenic epitopes PSA-1, PSA-2, and PSA-3, prostate-specific membrane antigen (PSMA), T-cell receptor/CD3-zeta chain, MAGE-family of tumor antigens (e.g., MAGE-A1, MAGE-A2, MAGE-A3, MAGE-A4, MAGE-A5, MAGE-A6, MAGE-A7, MAGE-A8, MAGE-A9, MAGE-A10, MAGE-A11, MAGE-A12, MAGE-Xp2 (MAGE-B2), MAGE-Xp3 (MAGE-B3), MAGE-Xp4 (MAGE-B4), MAGE-C1, MAGE-C2, MAGE-C3, MAGE-C4, MAGE-C5), GAGE-family of tumor antigens (e.g., GAGE-1, GAGE-2, GAGE-3, GAGE-4, GAGE-5, GAGE-6, GAGE-7, GAGE-8, GAGE-9), BAGE, RAGE, LAGE-1, NAG, GnT-V, MUM-1, CDK4, tyrosinase, p53, MUC family, HER2/neu, p21ras, RCAS1, α-fetoprotein, E-cadherin, α-catenin, β-catenin and γ-catenin, p120ctn, gp100 Pme117, PRAME, NY-ESO-1, cdc27, adenomatous polyposis coli protein (APC), fodrin, Connexin 37, Ig-idiotype, p15, gp75, GM2 and GD2 gangliosides, viral products such as human papilloma virus proteins, Smad family of tumor antigens, Imp-1, NA, EBV-encoded nuclear antigen (EBNA)-1, brain glycogen phosphorylase, SSX-1, SSX-2 (HOM-MEL-40), SSX-1, SSX-4, SSX-5, SCP-1 CT-7, c-erbB-2, CD19, CD20, CD22, CD30, CD33, CD37, CD56, CD70, CD74, CD138, AGS16, MUC1, GPNMB, Ep-CAM, PD-L1, PD-L2, PMSA, and BCMA (TNFRSF17). In various embodiments, a targeting moiety of the Fc-based chimeric protein complex binds one or more of these tumor antigens. In an embodiment, the Fc-based chimeric protein complex binds to HER2. In another embodiment, the Fc-based chimeric protein complex binds to PD-L2.

[0162] In various embodiments, the recognition domain of the present Fc-based chimeric protein complex binds but does not functionally modulate the target (e.g. antigen, receptor) of interest, e.g. the recognition domain is, or is akin to, a binding antibody. For instance, in various embodiments, the recognition domain simply targets the antigen or receptor but does not substantially inhibit, reduce or functionally modulate a biological effect that the antigen or receptor has. For example, some of the smaller antibody formats described above (e.g. as compared to, for example, full antibodies) have the ability to target hard to access epitopes and provide a larger spectrum of specific binding locales. In various embodiments, the recognition domain binds an epitope that is physically separate from an antigen or receptor site that is important for its biological activity (e.g. the antigen's active site).

[0163] Such non-neutralizing binding finds use in various embodiments of the present invention, including methods in which the present Fc-based chimeric protein complex is used to directly or indirectly recruit active immune cells to a site of need via an effector antigen, such as any of those described herein. For example, in various embodiments, the present Fc-based chimeric protein complex may be used to directly or indirectly recruit cytotoxic T cells via CD8 to a tumor cell in a method of reducing or eliminating a tumor (e.g. the Fc-based chimeric protein complex may comprise an anti-CD8 recognition domain and a recognition domain directed against a tumor antigen). In such embodiments, it is desirable to directly or indirectly recruit CD8-expressing cytotoxic T cells but not to functionally modulate the CD8 activity. On the contrary, in these embodiments, CD8 signaling is an important piece of the tumor reducing or eliminating effect. By way of further example, in various methods of reducing or eliminating tumors, the present Fc-based chimeric protein complex is used to directly or indirectly recruit dendritic cells (DCs) via CLEC9A (e.g. the Fc-based chimeric protein complex may comprise an anti-CLEC9A recognition domain and a recognition domain directed against a tumor antigen). In such embodiments, it is desirable to directly or indirectly recruit CLEC9A-expressing DCs but not to functionally modulate the CLEC9A activity. On the contrary, in these embodiments, CLEC9A signaling is an important piece of the tumor reducing or eliminating effect.

[0164] In various embodiments, the recognition domain of the present Fc-based chimeric protein complex binds to an immune modulatory antigen (e.g. immune stimulatory or immune inhibitory). In various embodiments, the immune modulatory antigen is one or more of 4-1BB, OX-40, HVEM, GITR, CD27, CD28, CD30, CD40, ICOS ligand; OX-40 ligand, LIGHT (CD258), GITR ligand, CD70, B7-1, B7-2, CD30 ligand, CD40 ligand, ICOS, ICOS ligand, CD137 ligand and TL1A. In various embodiments, such immune stimulatory antigens are expressed on a tumor cell. In various embodiments, the recognition domain of the present Fc-based chimeric protein complex binds but does not functionally modulate such immune stimulatory antigens and therefore allows recruitment of cells expressing these antigens without the reduction or loss of their potential tumor reducing or eliminating capacity.

[0165] In various embodiments, the recognition domain of the present Fc-based chimeric protein complex may be in the context of Fc-based chimeric protein complex that comprises two recognition domains that have neutralizing activity, or comprises two recognition domains that have non-neutralizing (e.g. binding) activity, or comprises one recognition domain that has neutralizing activity and one recognition domain that has non-neutralizing (e.g. binding) activity.

[0166] In some embodiments, the Fc-based chimeric protein complex of the present invention include a human IFNγ or human TNFα signaling agent or a targeting moiety that is homomeric or heteromeric. In some embodiments, the human IFNγ or human TNFα signaling agent or the targeting moiety is a homomeric dimer, a homomeric trimer, a heteromeric dimer, or a heteromeric trimer.

### Clec9A Targeting Moieties

[0167] In some embodiments, the targeting moiety is a Clec9A targeting moiety that is a protein-based agent capable of specific binding to Clec9A. In some embodiments, the Clec9A targeting moiety is a protein-based agent capable of specific binding to Clec9A without functional modulation (e.g., partial or full neutralization) of Clec9A. Clec9A is a group V C-type lectin-like receptor (CTLR) expressed on the surface of a subset of dendritic cells (i.e., BDCA₃+ dendritic cells) specialized for the uptake and processing of materials from dead cells. Clec9A recognizes a conserved component within nucleated and nonnucleated cells, exposed when cell membranes are damaged. Clec9A is expressed at the cell surface as a glycosylated dimer and can mediate endocytosis, but not phagocytosis. Clec9A possesses a cytoplasmic immunoreceptor tyrosine-based activation-like motif that can recruit Syk kinase and induce proinflammatory cytokine production (see Huysamen et al. (2008), JBC, 283:16693-701).

[0168] In various embodiments, the Clec9A targeting moiety comprises an antigen recognition domain that recognizes an epitope present on Clec9A. In an embodiment, the antigen-recognition domain recognizes one or more linear epitopes present on Clec9A. In some embodiments, a linear epitope refers to any continuous sequence of amino acids present on Clec9A. In another embodiment, the antigen-recognition domain recognizes one or more conformational epitopes present on Clec9A. As used herein, a conformation epitope refers to one or more sections of amino acids (which may be discontinuous) which form a three-dimensional surface with features and/or shapes and/or tertiary structures capable of being recognized by an antigen recognition domain.

[0169] In various embodiments, the Clec9A targeting moiety can bind to the full-length and/or mature forms and/or isoforms and/or splice variants and/or fragments and/or any other naturally occurring or synthetic analogs, variants, or mutants of human Clec9A. In various embodiments, the Clec9A targeting moiety can bind to any forms of the human Clec9A, including monomeric, dimeric, heterodimeric, multimeric and associated forms. In an embodiment, the Clec9A binding agent binds to the monomeric form of Clec9A. In another embodiment, the Clec9A targeting moiety binds to a dimeric form of Clec9A. In a further embodiment, the Clec9A targeting moiety binds to glycosylated form of Clec9A, which may be either monomeric or dimeric.

[0170] In an embodiment, the Clec9A targeting moiety an antigen recognition domain that recognizes one or more epitopes present on human Clec9A. In an embodiment, the human Clec9A comprises the amino acid sequence of:

(SEQ ID NO: 26)
MHEEEIYTSLQWDSPAPDTYQKCLSSNKCSGACCLVMVISCVFCMGLLTA
SIFLGVKLLQVSTIAMQQQEKLIQQERALLNFTEWKRSCALQMKYCQAFM
QNSLSSAHNSSPCPNNWIQNRESCYYVSEIWSIWHTSQENCLKEGSTLLQ
IESKEEMDFITGSLRKIKGSYDYWVGLSQDGHSGRWLWQDGSSPSPGLLP
AERSQSANQVCGYVKSNSLLSSNCSTWKYFICEKYALRSSV.

[0171] In various embodiments, the Clec9A targeting moiety is capable of specific binding. In various embodiments, the Clec9A targeting moiety comprises an antigen recognition domain such as an antibody or derivatives thereof.

[0172] In some embodiments, the Clec9A targeting moiety comprises an antibody derivative or format. In some embodiments, the Clec9A targeting moiety comprises a targeting moiety which is a single-domain antibody, a recombinant heavy-chain-only antibody (VHH), a single-chain antibody (scFv), a shark heavy-chain-only antibody (VNAR), a microprotein (cysteine knot protein, knottin), a DARPin; a Tetranectin; an Affibody; a Transbody; an alphabody; a bicyclic peptide; an Anticalin; an AdNectin; an Affilin; an Affimer, a Microbody; an aptamer; an alterase; a plastic antibody; a phylomer; a stradobody; a maxibody; an evibody; a fynomer, an armadillo repeat protein, a Kunitz domain, an avimer, an atrimer, a probody, an immunobody, a triomab, a troybody; a pepbody; a vaccibody, a UniBody; a DuoBody, a Fv, a Fab, a Fab′, a F(ab′)₂, a peptide mimetic molecule, or a small (e.g. synthetic or natural) molecule, e.g. without limitation, as described in US Patent Nos. or Patent Publication Nos. U.S. Pat. No. 7,417,130, US 2004/132094, U.S. Pat. No. 5,831,012, US 2004/023334, U.S. Pat. Nos. 7,250,297, 6,818,418, US 2004/209243, U.S. Pat. Nos. 7,838,629, 7,186,524, 6,004,746, 5,475,096, US 2004/146938, US 2004/157209, U.S. Pat. Nos. 6,994,982, 6,794,144, US 2010/239633, U.S. Pat. No. 7,803,907, US 2010/119446, and/or U.S. Pat. No. 7,166,697, the contents of which are hereby incorporated by reference in their entireties. See also, Storz MAbs. 2011 May-June; 3(3): 310-317.

[0173] In some embodiments, the Clec9A targeting moiety is a single-domain antibody, such as a VHH. The VHH may be derived from, for example, an organism that produces VHH antibody such as a camelid, a shark, or the VHH may be a designed VHH. VHHs are antibody-derived therapeutic proteins that contain the unique structural and functional properties of naturally-occurring heavy-chain antibodies. VHH technology is based on fully functional antibodies from camelids that lack light chains. These heavy-chain antibodies contain a single variable domain (V_{H}H) and two constant domains (CH2 and CH3).

[0174] In an embodiment, the Clec9A targeting moiety comprises a VHH. In some embodiments, the VHH is a humanized VHH or camelized VHH.

[0175] In some embodiments, the VHH comprises a fully human V_{H} domain, e.g. a HUMABODY (Crescendo Biologics, Cambridge, UK). In some embodiments, fully human V_{H} domain, e.g. a HUMABODY is monovalent, bivalent, or trivalent. In some embodiments, the fully human V_{H} domain, e.g. a HUMABODY is mono- or multi-specific such as monospecific, bispecific, or trispecific. Illustrative fully human V_{H} domains, e.g. HUMABODIES are described in, for example, WO2016/113555 and WO2016/113557, the entire disclosure of which is incorporated by reference.

[0176] In some embodiments, the Clec9A targeting moiety is a VHH comprising a single amino acid chain having four “framework regions” or FRs and three “complementary determining regions” or CDRs. As used herein, “framework region” or “FR” refers to a region in the variable domain which is located between the CDRs. As used herein, “complementary determining region” or “CDR” refers to variable regions in VHHs that contains the amino acid sequences capable of specifically binding to antigenic targets.

[0177] In various embodiments, the Clec9A targeting moiety comprises a VHH having a variable domain comprising at least one CDR1, CDR2, and/or CDR3 sequences. In various embodiments, the Clec9A targeting moiety comprises a VHH having a variable region comprising at least one FR1, FR2, FR3, and FR4 sequences.

[0178] In some embodiments, the CDR1 sequence is selected from SEQ ID Nos.: 27-112.

[0179] In some embodiments, the CDR2 sequence is selected from SEQ ID Nos.: 113-200.

[0180] In some embodiments, the CDR3 sequence is selected from SEQ ID Nos: 201-287, LGR, and VIK.

[0181] In an exemplary embodiment, the Clec9A targeting moiety comprises SEQ ID NO: 27, SEQ ID NO: 113, and SEQ ID NO: 201.

[0182] In an exemplary embodiment, the Clec9A targeting moiety comprises SEQ ID NO: 28, SEQ ID NO: 114, and SEQ ID NO: 202.

[0183] In an exemplary embodiment, the Clec9A targeting moiety comprises SEQ ID NO: 29, SEQ ID NO: 115, and SEQ ID NO: 202.

[0184] In an exemplary embodiment, the Clec9A targeting moiety comprises SEQ ID NO: 27, SEQ ID NO: 116, and SEQ ID NO: 203.

[0185] In an exemplary embodiment, the Clec9A targeting moiety comprises SEQ ID NO: 30, SEQ ID NO: 117, and SEQ ID NO: 205.

[0186] In an exemplary embodiment, the Clec9A targeting moiety comprises SEQ ID NO: 31, SEQ ID NO: 118, and SEQ ID NO: 205.

[0187] In an exemplary embodiment, the Clec9A targeting moiety comprises SEQ ID NO: 32, SEQ ID NO: 119, and SEQ ID NO: 206.

[0188] In an exemplary embodiment, the Clec9A targeting moiety comprises SEQ ID NO: 33, SEQ ID NO: 120, and SEQ ID NO: 207.

[0189] In an exemplary embodiment, the Clec9A targeting moiety comprises SEQ ID NO: 33, SEQ ID NO: 120, and SEQ ID NO: 208.

[0190] In an exemplary embodiment, the Clec9A targeting moiety comprises SEQ ID NO: 33, SEQ ID NO: 120, and SEQ ID NO: 209.

[0191] In an exemplary embodiment, the Clec9A targeting moiety comprises SEQ ID NO: 34, SEQ ID NO: 121, and SEQ ID NO: 210.

[0192] In an exemplary embodiment, the Clec9A targeting moiety comprises SEQ ID NO: 35, SEQ ID NO: 122, and SEQ ID NO: 211.

[0193] In an exemplary embodiment, the Clec9A targeting moiety comprises SEQ ID NO:35, SEQ ID NO: 122, and SEQ ID NO: 212.

[0194] In an exemplary embodiment, the Clec9A targeting moiety comprises SEQ ID NO: 36, SEQ ID NO: 123, and SEQ ID NO: 213.

[0195] In an exemplary embodiment, the Clec9A targeting moiety comprises SEQ ID NO: 37, SEQ ID NO: 124, and SEQ ID NO: 214.

[0196] In an exemplary embodiment, the Clec9A targeting moiety comprises SEQ ID NO: 38, SEQ ID NO: 125, and SEQ ID NO: 214.

[0197] In an exemplary embodiment, the Clec9A targeting moiety comprises SEQ ID NO: 39, SEQ ID NO: 126, and SEQ ID NO: 214.

[0198] In an exemplary embodiment, the Clec9A targeting moiety comprises SEQ ID NO: 40, SEQ ID NO: 127, and SEQ ID NO: 214.

[0199] In an exemplary embodiment, the Clec9A targeting moiety comprises SEQ ID NO: 41, SEQ ID NO: 128, and SEQ ID NO: 214.

[0200] In an exemplary embodiment, the Clec9A targeting moiety comprises SEQ ID NO: 42, SEQ ID NO: 128, and SEQ ID NO: 214.

[0201] In an exemplary embodiment, the Clec9A targeting moiety comprises SEQ ID NO: 43, SEQ ID NO: 129, and SEQ ID NO: 215.

[0202] In an exemplary embodiment, the Clec9A targeting moiety comprises SEQ ID NO: 44, SEQ ID NO: 130, and LGR.

[0203] In an exemplary embodiment, the Clec9A targeting moiety comprises SEQ ID NO: 44, SEQ ID NO: 131, and LGR.

[0204] In an exemplary embodiment, the Clec9A targeting moiety comprises SEQ ID NO: 44, SEQ ID NO: 132, and LGR.

[0205] In an exemplary embodiment, the Clec9A targeting moiety comprises SEQ ID NO: 45, SEQ ID NO: 133, and LGR.

[0206] In an exemplary embodiment, the Clec9A targeting moiety comprises SEQ ID NO: 46, SEQ ID NO: 134, and VIK.

[0207] By way of example, in some embodiments, the Clec9A targeting moiety comprises an amino acid sequence selected from the following sequences:
[0208] R2CHCL8 (SEQ ID NO: 288); R1CHCL50 (SEQ ID NO: 289); R1CHCL21 (SEQ ID NO: 290); R2CHCL87 (SEQ ID NO: 291); R2CHCL24 (SEQ ID NO: 292); R2CHCL38 (SEQ ID NO: 293); R1CHCL16 (SEQ ID NO: 294); R2CHCL10 (SEQ ID NO: 295); R1CHCL34 (SEQ ID NO: 296); R1CHCL82 (SEQ ID NO: 297); R2CHCL3 (SEQ ID NO: 298); R2CHCL69 (SEQ ID NO:299); R1CHCL56 (SEQ ID NO: 300); R2CHCL32 (SEQ ID NO: 301); R2CHCL49 (SEQ ID NO: 302); R2CHCL53 (SEQ ID NO: 303); R2CHCL22 (SEQ ID NO: 304); R2CHCL25 (SEQ ID NO: 305); R2CHCL18 (SEQ ID NO: 306); R1CHCL23 (SEQ ID NO: 307); R1CHCL27 (SEQ ID NO: 308); R2CHCL13 (SEQ ID NO: 309); R2CHCL14 (SEQ ID NO: 310); R2CHCL42 (SEQ ID NO: 311); R2CHCL41 (SEQ ID NO: 312); R2CHCL94 (SEQ ID NO: 313); or R2CHCL27 (SEQ ID NO: 314).

[0209] By way of example, in some embodiments, the Clec9A targeting moiety comprises an amino acid sequence selected from the following sequences:
[0210] 1LEC 7 (SEQ ID NO: 315); 1LEC 9 (SEQ ID NO: 316); 1LEC 26 (SEQ ID NO: 317); 1LEC 27 (SEQ ID NO: 318); 1LEC 28 (SEQ ID NO: 319); 1LEC 30 (SEQ ID NO: 320); 1LEC 38 (SEQ ID NO: 333); 1LEC 42 (SEQ ID NO: 334); 1LEC 51 (SEQ ID NO: 335); 1LEC 61 (SEQ ID NO: 336); 1LEC 62 (SEQ ID NO: 337); 1LEC 63 (SEQ ID NO: 338); 1LEC 64 (SEQ ID NO: 339); 1LEC 70 (SEQ ID NO: 340); 1LEC 84 (SEQ ID NO: 341); 1LEC 88 (SEQ ID NO: 342); 1LEC 91 (SEQ ID NO: 343); 1LEC 92 (SEQ ID NO: 344); 1LEC 94 (SEQ ID NO: 345); 2LEC 6 (SEQ ID NO: 346); 2LEC 13 (SEQ ID NO: 347); 2LEC 16 (SEQ ID NO: 348); 2LEC 20 (SEQ ID NO: 349); 2LEC 23 (SEQ ID NO: 350); 2LEC 24 (SEQ ID NO: 351); 2LEC 26 (SEQ ID NO: 352); 2LEC 38 (SEQ ID NO: 353); 2LEC 48 (SEQ ID NO: 354); 2LEC 53 (SEQ ID NO: 355); 2LEC 54 (SEQ ID NO: 356); 2LEC 55 (SEQ ID NO: 357); 2LEC 59 (SEQ ID NO: 358); 2LEC 60 (SEQ ID NO: 359); 2LEC 61 (SEQ ID NO: 360); 2LEC 62 (SEQ ID NO: 361); 2LEC 63 (SEQ ID NO: 362); 2LEC 67 (SEQ ID NO: 363); 2LEC 68 (SEQ ID NO: 364); 2LEC 76 (SEQ ID NO: 365); 2LEC 83 (SEQ ID NO: 366); 2LEC 88 (SEQ ID NO: 367); 2LEC 89 (SEQ ID NO: 368); 2LEC 90 (SEQ ID NO: 369); 2LEC 93 (SEQ ID NO: 370); 2LEC 95 (SEQ ID NO: 371); 3LEC 4 (SEQ ID NO: 372); 3LEC 6 (SEQ ID NO: 373); 3LEC 9 (SEQ ID NO: 374); 3LEC 11 (SEQ ID NO: 375); 3LEC 13 (SEQ ID NO: 376); 3LEC 15 (SEQ ID NO: 377); 3LEC 22 (SEQ ID NO: 378); 3LEC 23 (SEQ ID NO: 379); 3LEC 27 (SEQ ID NO: 380); 3LEC 30 (SEQ ID NO: 381); 3LEC 36 (SEQ ID NO: 382); 3LEC 55 (SEQ ID NO: 383); 3LEC 57 (SEQ ID NO: 384); 3LEC 61 (SEQ ID NO: 385); 3LEC 62 (SEQ ID NO: 386); 3LEC 66 (SEQ ID NO: 387); 3LEC 69 (SEQ ID NO: 388); 3LEC 76 (SEQ ID NO: 389); 3LEC 82 (SEQ ID NO: 390); 3LEC 89 (SEQ ID NO: 391); or 3LEC 94 (SEQ ID NO: 392).

[0211] In some embodiments, the Clec9A targeting moiety comprises an amino acid sequence selected from SEQ ID Nos: 315-320 and 333-392 (provided above) without the terminal histidine tag sequence (i.e., HHHHHH; SEQ ID NO: 393).

[0212] In some embodiments, the Clec9A targeting moiety comprises an amino acid sequence selected from SEQ ID Nos: 315-320 and 333-392 (provided above) without the HA tag (i.e., YPYDVPDYGS; SEQ ID NO: 394).

[0213] In some embodiments, the Clec9A targeting moiety comprises an amino acid sequence selected from SEQ ID Nos: 315-320 and 333-392 (provided above) without the AAA linker (i.e., AAA).

[0214] In some embodiments, the Clec9A targeting moiety comprises an amino acid sequence selected from SEQ ID Nos: 315-320 and 333-392 (provided above) without the AAA linker, HA tag, and terminal histidine tag sequence (i.e., AAAYPYDVPDYGSHHHHHH; SEQ ID NO: 395).

[0215] In an embodiment, the Clec9A targeting moiety comprises the anti-Clec9A antibody as disclosed in Tullett et al., JCI Insight. 2016; 1(7):e87102, the entire disclosures of which are hereby incorporated by reference.

[0216] In some embodiments, the present technology contemplates the use of any natural or synthetic analogs, mutants, variants, alleles, homologs and orthologs (herein collectively referred to as “analogs”) of the Clec9A targeting moieties described herein. In various embodiments, the amino acid sequence of the Clec9A targeting moiety further includes an amino acid analog, an amino acid derivative, or other non-classical amino acids.

[0217] In various embodiments, the Clec9A targeting moiety comprising a sequence that is at least 60% identical to any one of the sequences disclosed herein. For example, the Clec9A targeting moiety may comprise a sequence that is at least about 60%, at least about 61%, at least about 62%, at least about 63%, at least about 64%, at least about 65%, at least about 66%, at least about 67%, at least about 68%, at least about 69%, at least about 70%, at least about 71%, at least about 72%, at least about 73%, at least about 74%, at least about 75%, at least about 76%, at least about 77%, at least about 78%, at least about 79%, at least about 80%, at least about 81%, at least about 82%, at least about 83%, at least about 84%, at least about 85%, at least about 86%, at least about 87%, at least about 88%, at least about 89%, at least about 90%, at least about 91%, at least about 92%, at least about 93%, at least about 94%, at least about 95%, at least about 96%, at least about 97%, at least about 98%, at least about 99%, or 100% identical to any of the Clec9A sequences disclosed herein (e.g. about 60%, or about 61%, or about 62%, or about 63%, or about 64%, or about 65%, or about 66%, or about 67%, or about 68%, or about 69%, or about 70%, or about 71%, or about 72%, or about 73%, or about 74%, or about 75%, or about 76%, or about 77%, or about 78%, or about 79%, or about 80%, or about 81%, or about 82%, or about 83%, or about 84%, or about 85%, or about 86%, or about 87%, or about 88%, or about 89%, or about 90%, or about 91%, or about 92%, or about 93%, or about 94%, or about 95%, or about 96%, or about 97%, or about 98%, about 99% or about 100% sequence identity to any one of the Clec9A sequences disclosed herein).

[0218] In various embodiments, the Clec9A targeting moiety comprising an amino acid sequence having one or more amino acid mutations with respect to any one of the sequences disclosed herein. In various embodiments, the Clec9A targeting moiety comprises an amino acid sequence having one, or two, or three, or four, or five, or six, or seen, or eight, or nine, or ten, or fifteen, or twenty amino acid mutations with respect to any one of the sequences disclosed herein. In some embodiments, the one or more amino acid mutations may be independently selected from substitutions, insertions, deletions, and truncations.

[0219] In some embodiments, the amino acid mutations are amino acid substitutions, and may include conservative and/or non-conservative substitutions.

[0220] “Conservative substitutions” may be made, for instance, on the basis of similarity in polarity, charge, size, solubility, hydrophobicity, hydrophilicity, and/or the amphipathic nature of the amino acid residues involved. The 20 naturally occurring amino acids can be grouped into the following six standard amino acid groups: (1) hydrophobic: Met, Ala, Val, Leu, Ile; (2) neutral hydrophilic: Cys, Ser, Thr; Asn, Gln; (3) acidic: Asp, Glu; (4) basic: His, Lys, Arg; (5) residues that influence chain orientation: Gly, Pro; and (6) aromatic: Trp, Tyr, Phe.

[0221] As used herein, “conservative substitutions” are defined as exchanges of an amino acid by another amino acid listed within the same group of the six standard amino acid groups shown above. For example, the exchange of Asp by Glu retains one negative charge in the so modified polypeptide. In addition, glycine and proline may be substituted for one another based on their ability to disrupt α-helices.

[0222] As used herein, “non-conservative substitutions” are defined as exchanges of an amino acid by another amino acid listed in a different group of the six standard amino acid groups (1) to (6) shown above.

[0223] In various embodiments, the substitutions may also include non-classical amino acids. Exemplary non-classical amino acids include, but are not limited to, selenocysteine, pyrrolysine, N-formylmethionine β-alanine, GABA and δ-Aminolevulinic acid, 4-aminobenzoic acid (PABA), D-isomers of the common amino acids, 2,4-diaminobutyric acid, α-amino isobutyric acid, 4-aminobutyric acid, Abu, 2-amino butyric acid, γ-Abu, ε-Ahx, 6-amino hexanoic acid, Aib, 2-amino isobutyric acid, 3-amino propionic acid, ornithine, norleucine, norvaline, hydroxyproline, sarcosme, citrulline, homocitrulline, cysteic acid, t-butylglycine, t-butylalanine, phenylglycine, cyclohexylalanine, β-alanine, fluoro-amino acids, designer amino acids such as p methyl amino acids, C α-methyl amino acids, N α-methyl amino acids, and amino acid analogs in general.

[0224] In various embodiments, the amino acid mutation may be in the CDRs of the targeting moiety (e.g., the CDR1, CDR2 or CDR3 regions). In another embodiment, amino acid alteration may be in the framework regions (FRs) of the targeting moiety (e.g., the FR1, FR2, FR3, or FR4 regions).

[0225] Modification of the amino acid sequences may be achieved using any known technique in the art e.g., site-directed mutagenesis or PCR based mutagenesis. Such techniques are described, for example, in Sambrook et al., Molecular Cloning: A Laboratory Manual, Cold Spring Harbor Press, Plainview, N.Y., 1989 and Ausubel et al., Current Protocols in Molecular Biology, John Wiley & Sons, New York, N.Y., 1989.

[0226] In various embodiments, the mutations do not substantially reduce the present Clec9A binding agent's capability to specifically bind to Clec9A. In various embodiments, the mutations do not substantially reduce the present Clec9A binding agent's capability to specifically bind to Clec9A and without functionally modulating (e.g., partially or fully neutralizing) Clec9A.

[0227] In various embodiments, the binding affinity of the Clec9A targeting moiety for the full-length and/or mature forms and/or isoforms and/or splice variants and/or fragments and/or monomeric and/or dimeric forms and/or any other naturally occurring or synthetic analogs, variants, or mutants (including monomeric and/or dimeric forms) of human Clec9A may be described by the equilibrium dissociation constant (K_{D}). In various embodiments, the Clec9A targeting moiety binds to the full-length and/or mature forms and/or isoforms and/or splice variants and/or fragments and/or any other naturally occurring or synthetic analogs, variants, or mutants (including monomeric and/or dimeric forms) of human Clec9A with a K_{D} of less than about 1 uM, about 900 nM, about 800 nM, about 700 nM, about 600 nM, about 500 nM, about 400 nM, about 300 nM, about 200 nM, about 100 nM, about 90 nM, about 80 nM, about 70 nM, about 60 nM, about 50 nM, about 40 nM, about 30 nM, about 20 nM, about 10 nM, or about 5 nM, or about 1 nM.

[0228] In various embodiments, the Clec9A targeting moiety binds but does not functionally modulate (e.g., partially or fully neutralize) the antigen of interest, i.e., Clec9A. For instance, in various embodiments, the Clec9A targeting moiety simply targets the antigen but does not substantially functionally modulate (e.g. partially or fully inhibit, reduce or neutralize) a biological effect that the antigen has. In various embodiments, the Clec9A targeting moiety binds an epitope that is physically separate from an antigen site that is important for its biological activity (e.g. an antigen's active site).

[0229] Such binding without significant function modulation finds use in various embodiments of the present invention, including methods in which the Clec9A targeting moiety is used to directly or indirectly recruit active immune cells to a site of need via an effector antigen. For example, in various embodiments, the Clec9A targeting moiety may be used to directly or indirectly recruit dendritic cells via Clec9A to a tumor cell in a method of reducing or eliminating a tumor (e.g. the Clec9A binding agent may comprise a targeting moiety having an anti-Clec9A antigen recognition domain and a targeting moiety having a recognition domain (e.g. antigen recognition domain) directed against a tumor antigen or receptor). In such embodiments, it is desirable to directly or indirectly recruit dendritic cells but not to functionally modulate or neutralize the Clec9A activity. In these embodiments, Clec9A signaling is an important piece of the tumor reducing or eliminating effect.

[0230] In some embodiments, the Clec9A targeting moiety enhances antigen-presentation by dendritic cells. For example, in various embodiments, the Clec9A targeting moiety can directly or indirectly recruit dendritic cells via Clec9A to a tumor cell, where tumor antigens are subsequently endocytosed and presented on the dendritic cell for induction of potent humoral and cytotoxic T cell responses.

[0231] In other embodiments (for example, related to treating autoimmune or neurodegenerative disease), the Clec9A targeting moiety binds and neutralizes the antigen of interest, i.e., Clec9A. For instance, in various embodiments, the present methods may inhibit or reduce Clec9A signaling or expression, e.g. to cause a reduction in an immune response.

### CD8 Targeting Moieties

[0232] In various embodiments, the targeting moiety is a CD8 targeting moiety that is a protein-based agent capable of specific binding to CD8. In various embodiments, the CD8 targeting moiety is a protein-based agent capable of specific binding to CD8 without functionally modulating (e.g. partial or complete neutralization) CD8.

[0233] CD8 is a heterodimeric type I transmembrane glycoprotein, whose α and β chains are both comprised of an immunoglobulin (Ig)-like extracellular domain connected by an extended O-glycosylated stalk to a single-pass transmembrane domain and a short cytoplasmic tail. The cytoplasmic region of the CD8 α-chain contains two cysteine motifs that serve as a docking site for src tyrosine kinase p56lck (Lck). In contrast, this Lck binding domain appears to be absent from the CD8 β chain, suggesting that the β chain is not involved in downstream signaling. CD8 functions as a co-receptor for the T-cell receptor with its principle role being the recruitment of Lck to the TCR-pMHC complex following co-receptor binding to MHC. The increase in the local concentration of this kinase activates a signaling cascade that recruits and activates ζ-chain-associated protein kinase 70 (ZAP-70), subsequently leading to the amplification of T-cell activation signals.

[0234] In some embodiments, the CD8 targeting moiety comprises an antigen recognition domain that recognizes an epitope present on the CD8 α and/or β chains. In an embodiment, the antigen-recognition domain recognizes one or more linear epitopes on the CD8 α and/or β chains. In some embodiment, a linear epitope refers to any continuous sequence of amino acids present on the CD8 α and/or β chains. In another embodiment, the antigen-recognition domain recognizes one or more conformational epitopes present on the CD8 α and/or β chains. As used herein, a conformation epitope refers to one or more sections of amino acids (which may be discontinuous) which form a three-dimensional surface with features and/or shapes and/or tertiary structures capable of being recognized by an antigen recognition domain.

[0235] In various embodiments, the CD8 targeting moiety may bind to the full-length and/or mature forms and/or isoforms and/or splice variants and/or fragments and/or any other naturally occurring or synthetic analogs, variants, or mutants of human CD8 α and/or β chains. In various embodiments, the CD8 targeting moiety may bind to any forms of the human CD8 α and/or β chains, including monomeric, dimeric, heterodimeric, multimeric and associated forms. In an embodiment, the CD8 binding agent binds to the monomeric form of CD8 α chain or CD8 β chain. In another embodiment, the CD8 targeting moiety binds to a homodimeric form comprised of two CD8 α chains or two CD8 β chains. In a further embodiment, the CD8 binding agent binds to a heterodimeric form comprised of one CD8 α chain and one CD8 β chain.

[0236] In an embodiment, the CD8 targeting moiety comprises an antigen recognition domain that recognizes one or more epitopes present on the human CD8 α chain. In an embodiment, the human CD8 α chain comprises the amino acid sequence of Isoform 1 (SEQ ID NO: 396).

[0237] In an embodiment, the human CD8 α chain comprises the amino acid sequence of Isoform 2 (SEQ ID NO: 397).

[0238] In an embodiment, the human CD8 α chain comprises the amino acid sequence of Isoform 3 (SEQ ID NO: 398).

[0239] In an embodiment, the CD8 targeting moiety comprises an antigen recognition domain that recognizes one or more epitopes present on the human CD8 β chain. In an embodiment, the human CD8 β chain comprises the amino acid sequence of Isoform 1 (SEQ ID NO: 399).

[0240] In an embodiment, the human CD8 β chain comprises the amino acid sequence of Isoform 2 (SEQ ID NO: 400).

[0241] In an embodiment, the human CD8 β chain comprises the amino acid sequence of Isoform 3 (SEQ ID NO: 401).

[0242] In an embodiment, the human CD8 β chain comprises the amino acid sequence of Isoform 4 (SEQ ID NO: 402).

[0243] In an embodiment, the human CD8 β chain comprises the amino acid sequence of Isoform 5 (SEQ ID NO: 403).

[0244] In an embodiment, the human CD8 β chain comprises the amino acid sequence of Isoform 6 (SEQ ID NO: 404).

[0245] In an embodiment, the human CD8 β chain comprises the amino acid sequence of Isoform 7 (SEQ ID NO: 405).

[0246] In an embodiment, the human CD8 β chain comprises the amino acid sequence of Isoform 8 (SEQ ID NO: 406).

[0247] In some embodiments, the CD8 targeting moiety is capable of specific binding. In various embodiments, the CD8 targeting moiety comprises an antigen recognition domain such as an antibody or derivatives thereof.

[0248] In some embodiments, the CD8 targeting moiety comprise an antibody derivative or format. In some embodiments, the CD8 targeting moiety comprises a single-domain antibody, a recombinant heavy-chain-only antibody (VHH), a single-chain antibody (scFv), a shark heavy-chain-only antibody (VNAR), a microprotein (cysteine knot protein, knottin), a DARPin; a Tetranectin; an Affibody; a Transbody; an Anticalin; an AdNectin; an alphabody; a bicyclic peptide; an Affilin; an Affimer, a Microbody; an aptamer; an alterase; a plastic antibody; a phylomer; a stradobody; a maxibody; an evibody; a fynomer, an armadillo repeat protein, a Kunitz domain, an avimer, an atrimer, a probody, an immunobody, a triomab, a troybody; a pepbody; a vaccibody, a UniBody; a DuoBody, a Fv, a Fab, a Fab′, a F(ab′)₂, a peptide mimetic molecule, or a small (e.g. synthetic or natural) molecule, e.g. without limitation, as described in US Patent Nos. or Patent Publication Nos. U.S. Pat. No. 7,417,130, US 2004/132094, U.S. Pat. No. 5,831,012, US 2004/023334, U.S. Pat. Nos. 7,250,297, 6,818,418, US 2004/209243, U.S. Pat. Nos. 7,838,629, 7,186,524, 6,004,746, 5,475,096, US 2004/146938, US 2004/157209, U.S. Pat. Nos. 6,994,982, 6,794,144, US 2010/239633, U.S. Pat. No. 7,803,907, US 2010/119446, and/or U.S. Pat. No. 7,166,697, the contents of which are hereby incorporated by reference in their entireties. See also, Storz MAbs. 2011 May-June; 3(3): 310-317.

[0249] In some embodiments, the CD8 targeting moiety comprises a single-domain antibody, such as a VHH. The VHH may be derived from, for example, an organism that produces VHH antibody such as a camelid, a shark, or the VHH may be a designed VHH. VHHs are antibody-derived therapeutic proteins that contain the unique structural and functional properties of naturally-occurring heavy-chain antibodies. VHH technology is based on fully functional antibodies from camelids that lack light chains. These heavy-chain antibodies contain a single variable domain (V_{H}H) and two constant domains (CH2 and CH3).

[0250] In an embodiment, the CD8 targeting moiety comprises a VHH. In some embodiments, the VHH is a humanized VHH or camelized VHH.

[0251] In some embodiments, the VHH comprises a fully human V_{H} domain, e.g. a HUMABODY (Crescendo Biologics, Cambridge, UK). In some embodiments, fully human V_{H} domain, e.g. a HUMABODY is monovalent, bivalent, or trivalent. In some embodiments, the fully human V_{H} domain, e.g. a HUMABODY is mono- or multi-specific such as monospecific, bispecific, or trispecific. Illustrative fully human V_{H} domains, e.g. a HUMABODIES are described in, for example, WO2016/113555 and WO2016/113557, the entire disclosure of which is incorporated by reference.

[0252] In some embodiments, the CD8 targeting moiety comprises a VHH comprising a single amino acid chain having four “framework regions” or FRs and three “complementary determining regions” or CDRs. As used herein, “framework region” or “FR” refers to a region in the variable domain that is located between the CDRs. As used herein, “complementary determining region” or “CDR” refers to variable regions in VHHs that contains the amino acid sequences capable of specifically binding to antigenic targets.

[0253] In various embodiments, the CD8 targeting moiety comprises a VHH having a variable domain comprising at least one CDR1, CDR2, and/or CDR3 sequences.

[0254] In some embodiments, the CDR1 sequence is selected from SEQ ID Nos: 407-477.

[0255] In some embodiments, the CDR2 sequence is selected from SEQ ID Nos: 478-548.

[0256] In some embodiments, the CDR3 sequence is selected from SEQ ID Nos: 549-620.

[0257] In various embodiments, the CD8 targeting moiety comprises SEQ ID NO: 407, SEQ ID NO: 478, and SEQ ID NO: 549.

[0258] In various embodiments, the CD8 targeting moiety comprises SEQ ID NO: 407, SEQ ID NO: 478, and SEQ ID NO: 550.

[0259] In various embodiments, the CD8 targeting moiety comprises SEQ ID NO: 407, SEQ ID NO: 478, and SEQ ID NO: 551.

[0260] In various embodiments, the CD8 targeting moiety comprises SEQ ID NO: 407, SEQ ID NO: 479, and SEQ ID NO: 549.

[0261] In various embodiments, the CD8 targeting moiety comprises SEQ ID NO: 407, SEQ ID NO: 479, and SEQ ID NO: 550.

[0262] In various embodiments, the CD8 targeting moiety comprises SEQ ID NO: 407, SEQ ID NO: 479, and SEQ ID NO: 551.

[0263] In various embodiments, the CD8 targeting moiety comprises SEQ ID NO: 408, SEQ ID NO: 478, and SEQ ID NO: 549.

[0264] In various embodiments, the CD8 targeting moiety comprises SEQ ID NO: 408, SEQ ID NO: 478, and SEQ ID NO: 550.

[0265] In various embodiments, the CD8 targeting moiety comprises SEQ ID NO: 408, SEQ ID NO: 478, and SEQ ID NO: 551.

[0266] In various embodiments, the CD8 targeting moiety comprises SEQ ID NO: 408, SEQ ID NO: 479, and SEQ ID NO: 549.

[0267] In various embodiments, the CD8 targeting moiety comprises SEQ ID NO: 408, SEQ ID NO: 479, and SEQ ID NO: 550.

[0268] In various embodiments, the CD8 targeting moiety comprises SEQ ID NO: 408, SEQ ID NO: 479, and SEQ ID NO: 551.

[0269] By way of example, in some embodiments, the CD8 targeting moiety comprises an amino acid sequence selected from the following sequences: R3HCD27 (SEQ ID NO: 621); R3HCD129 (SEQ ID NO: 622); or R2HCD26 (SEQ ID NO: 623).

[0270] In various embodiments, the CD8 targeting moiety comprises an amino acid sequence selected from the following sequences: 1CDA 7 (SEQ ID NO: 624); 1CDA 12 (SEQ ID NO: 625); 1CDA 14 (SEQ ID NO: 626); 1CDA 15 (SEQ ID NO: 627); 1CDA 17 (SEQ ID NO: 628); 1CDA 18 (SEQ ID NO: 629); 1CDA 19 (SEQ ID NO: 630); 1CDA 24 (SEQ ID NO: 631); 1CDA 26 (SEQ ID NO: 632); 1CDA 28 (SEQ ID NO: 633); 1CDA 37 (SEQ ID NO: 634); 1CDA 43 (SEQ ID NO: 635); 1CDA 45 (SEQ ID NO: 636); 1CDA 47 (SEQ ID NO: 637); 1CDA 48 (SEQ ID NO: 638); 1CDA 58 (SEQ ID NO: 639); 1CDA 65 (SEQ ID NO: 640); 1CDA 68 (SEQ ID NO: 641); 1CDA 73 (SEQ ID NO: 642); 1CDA 75 (SEQ ID NO: 643); 1CDA 86 (SEQ ID NO: 644); 1CDA 87 (SEQ ID NO: 645); 1CDA 88 (SEQ ID NO: 646); 1CDA 89 (SEQ ID NO: 647); 1CDA 92 (SEQ ID NO: 648); 1CDA 93 (SEQ ID NO: 649); 2CDA 1 (SEQ ID NO: 650); 2CDA 5 (SEQ ID NO: 651); 2CDA 22 (SEQ ID NO: 652); 2CDA 28 (SEQ ID NO: 653); 2CDA 62 (SEQ ID NO: 654); 2CDA 68 (SEQ ID NO: 655); 2CDA 73 (SEQ ID NO: 656); 2CDA 74 (SEQ ID NO: 657); 2CDA 75 (SEQ ID NO: 658); 2CDA 77 (SEQ ID NO: 659); 2CDA 81 (SEQ ID NO: 660); 2CDA 87 (SEQ ID NO: 661); 2CDA 88 (SEQ ID NO: 662); 2CDA 89 (SEQ ID NO: 663); 2CDA 91 (SEQ ID NO: 664); 2CDA 92 (SEQ ID NO: 665); 2CDA 93 (SEQ ID NO: 666); 2CDA 94 (SEQ ID NO: 667); 2CDA 95 (SEQ ID NO: 668); 3CDA 3 (SEQ ID NO: 669); 3CDA 8 (SEQ ID NO: 670); 3CDA 11 (SEQ ID NO: 671); 3CDA 18 (SEQ ID NO: 672); 3CDA 19 (SEQ ID NO: 673); 3CDA 21 (SEQ ID NO: 674); 3CDA 24 (SEQ ID NO: 675); 3CDA 28 (SEQ ID NO: 676); 3CDA 29 (SEQ ID NO: 677); 3CDA 31 (SEQ ID NO: 678); 3CDA 32 (SEQ ID NO: 679); 3CDA 33 (SEQ ID NO: 680); 3CDA 37 (SEQ ID NO: 681); 3CDA 40 (SEQ ID NO: 682); 3CDA 41 (SEQ ID NO:683); 3CDA 48 (SEQ ID NO: 684); 3CDA 57 (SEQ ID NO: 685); 3CDA 65 (SEQ ID NO: 686); 3CDA 70 (SEQ ID NO: 687); 3CDA 73 (SEQ ID NO: 688); 3CDA 83 (SEQ ID NO: 689); 3CDA 86 (SEQ ID NO: 690); 3CDA 88 (SEQ ID NO: 691); or 3CDA 90 (SEQ ID NO: 692).

[0271] In some embodiments, the CD8 targeting moiety comprises an amino acid sequence selected from SEQ ID NOs: 624-692 (provided above) without the terminal histidine tag sequence (i.e., HHHHHH; SEQ ID NO: 393).

[0272] In some embodiments, the CD8 targeting moiety comprises an amino acid sequence selected from SEQ ID NOs: 621-692 (provided above) without the HA tag (i.e., YPYDVPDYGS; SEQ ID NO: 394).

[0273] In some embodiments, the CD8 targeting moiety comprises an amino acid sequence selected from SEQ ID NOs: 621-692 (provided above) without the AAA linker (i.e., AAA).

[0274] In some embodiments, the CD8 targeting moiety comprises an amino acid sequence selected from SEQ ID NOs: 621-623 (provided above) without the AAA linker and HA tag.

[0275] In some embodiments, the CD8 targeting moiety comprises an amino acid sequence selected from SEQ ID NOs: 624-692 (provided above) without the AAA linker, HA tag, and terminal histidine tag sequence (i.e., AAAYPYDVPDYGSHHHHHH; SEQ ID NO: 395).

[0276] In some embodiments, the CD8 targeting moiety comprises an amino acid sequence described in US Patent Publication No. 2014/0271462, the entire contents of which are incorporated by reference. In various embodiments, the CD8 binding agent comprises an amino acid sequence described in Table 0.1, Table 0.2, Table 0.3, and/or FIGS. 1A-12I of US Patent Publication No. 2014/0271462, the entire contents of which are incorporated by reference. In various embodiments, the CD8 binding agent comprises a HCDR1 of SEQ ID NO: 693 or 694 and/or a HCDR2 of SEQ ID NO: 693 or 694 and/or a HCDR3 of SEQ ID NO: 693 or 694 and/or a LCDR1 of SEQ ID NO: 695 and/or a LCDR2 of SEQ ID NO: 695 and/or a LCDR3 of SEQ ID NO: 695.

[0277] In some embodiments, the present technology contemplates the use of any natural or synthetic analogs, mutants, variants, alleles, homologs and orthologs (herein collectively referred to as “analogs”) of the CD8 targeting moiety described herein. In some embodiments, the amino acid sequence of the CD8 targeting moiety further includes an amino acid analog, an amino acid derivative, or other non-classical amino acids.

[0278] In some embodiments, the CD8 targeting moiety comprises a targeting moiety comprising a sequence that is at least 60% identical to any one of the CD8 sequences disclosed herein. For example, the CD8 targeting moiety may comprise a targeting moiety comprising a sequence that is at least about 60%, at least about 61%, at least about 62%, at least about 63%, at least about 64%, at least about 65%, at least about 66%, at least about 67%, at least about 68%, at least about 69%, at least about 70%, at least about 71%, at least about 72%, at least about 73%, at least about 74%, at least about 75%, at least about 76%, at least about 77%, at least about 78%, at least about 79%, at least about 80%, at least about 81%, at least about 82%, at least about 83%, at least about 84%, at least about 85%, at least about 86%, at least about 87%, at least about 88%, at least about 89%, at least about 90%, at least about 91%, at least about 92%, at least about 93%, at least about 94%, at least about 95%, at least about 96%, at least about 97%, at least about 98%, at least about 99%, or 100% identical to any one of the CD8 sequences disclosed herein (e.g. about 60%, or about 61%, or about 62%, or about 63%, or about 64%, or about 65%, or about 66%, or about 67%, or about 68%, or about 69%, or about 70%, or about 71%, or about 72%, or about 73%, or about 74%, or about 75%, or about 76%, or about 77%, or about 78%, or about 79%, or about 80%, or about 81%, or about 82%, or about 83%, or about 84%, or about 85%, or about 86%, or about 87%, or about 88%, or about 89%, or about 90%, or about 91%, or about 92%, or about 93%, or about 94%, or about 95%, or about 96%, or about 97%, or about 98%, about 99% or about 100% sequence identity to any one of the CD8 sequences disclosed herein).

[0279] In various embodiments, the CD8 targeting moiety comprises an amino acid sequence having one or more amino acid mutations with respect to any one of the CD8 sequences disclosed herein. In various embodiments, the CD8 binding agent comprises a targeting moiety comprising an amino acid sequence having one, or two, or three, or four, or five, or six, or seen, or eight, or nine, or ten, or fifteen, or twenty amino acid mutations with respect to any one of the CD8 sequences disclosed herein. In some embodiments, the one or more amino acid mutations may be independently selected from substitutions, insertions, deletions, and truncations.

[0280] In some embodiments, the amino acid mutations are amino acid substitutions, and may include conservative and/or non-conservative substitutions.

[0281] “Conservative substitutions” may be made, for instance, on the basis of similarity in polarity, charge, size, solubility, hydrophobicity, hydrophilicity, and/or the amphipathic nature of the amino acid residues involved. The 20 naturally occurring amino acids can be grouped into the following six standard amino acid groups: (1) hydrophobic: Met, Ala, Val, Leu, Ile; (2) neutral hydrophilic: Cys, Ser, Thr; Asn, Gln; (3) acidic: Asp, Glu; (4) basic: His, Lys, Arg; (5) residues that influence chain orientation: Gly, Pro; and (6) aromatic: Trp, Tyr, Phe.

[0282] As used herein, “conservative substitutions” are defined as exchanges of an amino acid by another amino acid listed within the same group of the six standard amino acid groups shown above. For example, the exchange of Asp by Glu retains one negative charge in the so modified polypeptide. In addition, glycine and proline may be substituted for one another based on their ability to disrupt α-helices.

[0283] As used herein, “non-conservative substitutions” are defined as exchanges of an amino acid by another amino acid listed in a different group of the six standard amino acid groups (1) to (6) shown above.

[0284] In various embodiments, the substitutions may also include non-classical amino acids (e.g. selenocysteine, pyrrolysine, N-formylmethionine β-alanine, GABA and 5-Aminolevulinic acid, 4-aminobenzoic acid (PABA), D-isomers of the common amino acids, 2,4-diaminobutyric acid, α-amino isobutyric acid, 4-aminobutyric acid, Abu, 2-amino butyric acid, γ-Abu, ε-Ahx, 6-amino hexanoic acid, Aib, 2-amino isobutyric acid, 3-amino propionic acid, ornithine, norleucine, norvaline, hydroxyproline, sarcosme, citrulline, homocitrulline, cysteic acid, t-butylglycine, t-butylalanine, phenylglycine, cyclohexylalanine, β-alanine, fluoro-amino acids, designer amino acids such as p methyl amino acids, C α-methyl amino acids, N α-methyl amino acids, and amino acid analogs in general).

[0285] In various embodiments, the amino acid mutation may be in the CDRs of the targeting moiety (e.g., the CDR1, CDR2 or CDR3 regions). In another embodiment, amino acid alteration may be in the framework regions (FRs) of the targeting moiety (e.g., the FR1, FR2, FR3, or FR4 regions).

[0286] Modification of the amino acid sequences may be achieved using any known technique in the art e.g., site-directed mutagenesis or PCR based mutagenesis. Such techniques are described, for example, in Sambrook et al., Molecular Cloning: A Laboratory Manual, Cold Spring Harbor Press, Plainview, N.Y., 1989 and Ausubel et al., Current Protocols in Molecular Biology, John Wiley & Sons, New York, N.Y., 1989.

[0287] In various embodiments, the mutations do not substantially reduce the CD8 targeting moiety's capability to specifically bind to CD8. In various embodiments, the mutations do not substantially reduce the CD8 targeting moiety's capability to specifically bind to CD8 without functionally modulating CD8.

[0288] In various embodiments, the binding affinity of the CD8 targeting moiety for the full-length and/or mature forms and/or isoforms and/or splice variants and/or fragments and/or any other naturally occurring or synthetic analogs, variants, or mutants (including monomeric, dimeric, heterodimeric, multimeric and/or associated forms) of human CD8 α and/or β chains may be described by the equilibrium dissociation constant (K_{D}). In various embodiments, the CD8 targeting moiety binds to the full-length and/or mature forms and/or isoforms and/or splice variants and/or fragments and/or any other naturally occurring or synthetic analogs, variants, or mutants (including monomeric, dimeric, heterodimeric, multimeric and/or associated forms) of human CD8 α and/or β chains with a K_{D} of less than about 1 uM, about 900 nM, about 800 nM, about 700 nM, about 600 nM, about 500 nM, about 400 nM, about 300 nM, about 200 nM, about 100 nM, about 90 nM, about 80 nM, about 70 nM, about 60 nM, about 50 nM, about 40 nM, about 30 nM, about 20 nM, about 10 nM, or about 5 nM, or about 1 nM.

[0289] In various embodiments, the CD8 targeting moiety binds but does not functionally modulate the antigen of interest, i.e., CD8. For instance, in various embodiments, the CD8 targeting moiety simply targets the antigen but does not substantially functionally modulate the antigen, e.g. it does not substantially inhibit, reduce or neutralize a biological effect that the antigen has. In various embodiments, the CD8 targeting moiety binds an epitope that is physically separate from an antigen site that is important for its biological activity (e.g. an antigen's active site).

[0290] Such non-functionally modulating (e.g. non-neutralizing) binding finds use in various embodiments of the present invention, including methods in which the CD8 targeting moiety is used to directly or indirectly recruit active immune cells to a site of need via an effector antigen. For example, in various embodiments, the CD8 targeting moiety may be used to directly or indirectly recruit cytotoxic T cells via CD8 to a tumor cell in a method of reducing or eliminating a tumor (e.g. the CD8 binding agent may comprise a targeting moiety having an anti-CD8 antigen recognition domain and a targeting moiety having a recognition domain (e.g. an antigen recognition domain) directed against a tumor antigen or receptor). In such embodiments, it is desirable to directly or indirectly recruit CD8-expressing cytotoxic T cells but not to neutralize the CD8 activity. In these embodiments, CD8 signaling is an important piece of the tumor reducing or eliminating effect.

### PD-1, PD-L1, or PD-L2 Targeting Moieties

[0291] In some embodiments, the targeting moiety is a PD-1, PD-L1, or PD-L2 targeting moiety that is a protein-based agent capable of specific binding to PD-1, PD-L1, or PD-L2. In some embodiments, the PD-1, PD-L1, or PD-L2 targeting moiety binds but does not functionally modulate (e.g., partially or fully neutralize) the antigen of interest, i.e., PD-1, PD-L1, or PD-L2. For instance, in various embodiments, the PD-1, PD-L1, or PD-L2 targeting moiety simply targets the antigen but does not substantially functionally modulate (e.g. partially or fully inhibit, reduce or neutralize) a biological effect that the antigen has. In various embodiments, the PD-1, PD-L1, or PD-L2 targeting moiety binds an epitope that is physically separate from an antigen site that is important for its biological activity (e.g. an antigen's active site).

### PD-1 Targeting Moieties

[0292] Programmed cell death protein 1, also known as PD-1 and cluster of differentiation 279 (CD279), is a cell surface receptor that is primarily expressed on activated T cells, B cells, and macrophages. PD-1 has been shown to negatively regulate antigen receptor signaling upon engagement of its ligands (i.e., PD-L1 and/or PD-L2). PD-1 plays an important role in down-regulating the immune system and promoting self tolerance by suppressing T cell inflammatory activity. PD-1 is a type I transmembrane glycoprotein containing an Ig Variable-type (V-type) domain responsible for ligand binding and a cytoplasmic tail that is responsible for the binding of signaling molecules. The cytoplasmic tail of PD-1 contains two tyrosine-based signaling motifs, an ITIM (immunoreceptor tyrosine-based inhibition motif) and an ITSM (immunoreceptor tyrosine-based switch motif).

[0293] In some embodiments, the PD-1 targeting moiety comprises an antigen recognition domain that recognizes an epitope present on PD-1. In an embodiment, the antigen-recognition domain recognizes one or more linear epitopes present on PD-1. In some embodiments, a linear epitope refers to any continuous sequence of amino acids present on PD-1. In another embodiment, the antigen-recognition domain recognizes one or more conformational epitopes present on PD-1. As used herein, a conformation epitope refers to one or more sections of amino acids (which may be discontinuous) which form a three-dimensional surface with features and/or shapes and/or tertiary structures capable of being recognized by an antigen recognition domain.

[0294] In some embodiments, the PD-1 targeting moiety may bind to the full-length and/or mature forms and/or isoforms and/or splice variants and/or fragments and/or any other naturally occurring or synthetic analogs, variants, or mutants of human PD-1. In various embodiments, the PD-1 targeting moiety may bind to any forms of the human PD-1. In an embodiment, the PD-1 targeting moiety binds to a phosphorylated form of PD-1.

[0295] In an embodiment, the PD-1 targeting moiety comprises an antigen recognition domain that recognizes one or more epitopes present on human PD-1. In an embodiment, the human PD-1 comprises the amino acid sequence of (signal peptide underlined):

(SEQ ID NO: 696)
MQIPQAPWPVVWAVLQLGWRPGWFLDSPDRPWNPPTFSPALLVVTEGDNA
TFTCSFSNTSESFVLNWYRMSPSNQTDKLAAFPEDRSQPGQDCRFRVTQL
PNGRDFHMSVVRARRNDSGTYLCGAISLAPKAQIKESLRAELRVTERRAE
VPTAHPSPSPRPAGQFQTLVVGVVGGLLGSLVLLVWVLAVICSRAARGTI
GARRTGQPLKEDPSAVPVFSVDYGELDFQWREKTPEPPVPCVPEQTEYAT
IVFPSGMGTSSPARRGSADGPRSAQPLRPEDGHCSWPL.

[0296] In another embodiment, the human PD-1 comprises the amino acid sequence of SEQ ID NO: 696 without the amino-terminal signal peptide.

[0297] In some embodiments, the PD-1 targeting moiety is capable of specific binding. In various embodiments, the PD-1 targeting moiety comprises an antigen recognition domain such as an antibody or derivatives thereof.

[0298] In some embodiments, the PD-1 targeting moiety comprises an antibody derivative or format. In some embodiments, the PD-1 targeting moiety comprises a single-domain antibody, a recombinant heavy-chain-only antibody (VHH), a single-chain antibody (scFv), a shark heavy-chain-only antibody (VNAR), a microprotein (cysteine knot protein, knottin), a DARPin; a Tetranectin; an Affibody; a Transbody; an Anticalin; an AdNectin; an Affilin; an alphabody; a bicyclic peptide; an Affimer, a Microbody; an aptamer; an alterase; a plastic antibody; a phylomer; a stradobody; a maxibody; an evibody; a fynomer, an armadillo repeat protein, a Kunitz domain, an avimer, an atrimer, a probody, an immunobody, a triomab, a troybody; a pepbody; a vaccibody, a UniBody; a DuoBody, a Fv, a Fab, a Fab′, a F(ab′)₂, a peptide mimetic molecule, or a small (e.g. synthetic or natural) molecule, e.g. without limitation, as described in US Patent Nos. or Patent Publication Nos. U.S. Pat. No. 7,417,130, US 2004/132094, U.S. Pat. No. 5,831,012, US 2004/023334, U.S. Pat. Nos. 7,250,297, 6,818,418, US 2004/209243, U.S. Pat. Nos. 7,838,629, 7,186,524, 6,004,746, 5,475,096, US 2004/146938, US 2004/157209, U.S. Pat. Nos. 6,994,982, 6,794,144, US 2010/239633, U.S. Pat. No. 7,803,907, US 2010/119446, and/or U.S. Pat. No. 7,166,697, the contents of which are hereby incorporated by reference in their entireties. See also, Storz MAbs. 2011 May-June; 3(3): 310-317.

[0299] In some embodiments, the PD-1 targeting moiety comprises a single-domain antibody, such as a VHH. The VHH may be derived from, for example, an organism that produces VHH antibody such as a camelid, a shark, or the VHH may be a designed VHH. VHHs are antibody-derived therapeutic proteins that contain the unique structural and functional properties of naturally-occurring heavy-chain antibodies. VHH technology is based on fully functional antibodies from camelids that lack light chains. These heavy-chain antibodies contain a single variable domain (V_{H}H) and two constant domains (CH2 and CH3).

[0300] In an embodiment, the PD-1 targeting moiety comprises a VHH. In some embodiments, the VHH is a humanized VHH or camelized VHH.

[0301] In some embodiments, the VHH comprises a fully human V_{H} domain, e.g. a HUMABODY (Crescendo Biologics, Cambridge, UK). In some embodiments, fully human V_{H} domain, e.g. a HUMABODY is monovalent, bivalent, or trivalent. In some embodiments, the fully human V_{H} domain, e.g. a HUMABODY is mono- or multi-specific such as monospecific, bispecific, or trispecific. Illustrative fully human V_{H} domains, e.g. HUMABODIES are described in, for example, WO2016/113555 and WO2016/113557, the entire disclosure of which is incorporated by reference.

[0302] In some embodiments, the PD-1 targeting moiety comprises a VHH comprising a single amino acid chain having four “framework regions” or FRs and three “complementary determining regions” or CDRs. As used herein, “framework region” or “FR” refers to a region in the variable domain which is located between the CDRs. As used herein, “complementary determining region” or “CDR” refers to variable regions in VHHs that contains the amino acid sequences capable of specifically binding to antigenic targets.

[0303] In various embodiments, the PD-1 targeting moiety comprises a VHH having a variable domain comprising at least one CDR1, CDR2, and/or CDR3 sequences. In various embodiments, the PD-1 binding agent comprises a VHH having a variable region comprising at least one FR1, FR2, FR3, and FR4 sequences.

[0304] In some embodiments, the CDR1 sequence is selected from SEQ ID Nos.: 697-710.

[0305] In some embodiments, the CDR2 sequence is selected from SEQ ID Nos.: 711-724.

[0306] In some embodiments, the CDR3 sequence is selected from SEQ ID Nos.: 725-738.

[0307] In various exemplary embodiments, the PD-1 targeting moiety comprises an amino acid sequence selected from the following sequences:
[0308] 2PD23 (SEQ ID NO: 739); 2PD26 (SEQ ID NO: 740); 2PD90 (SEQ ID NO: 741); 2PD-106 (SEQ ID NO: 742); 2PD-16 (SEQ ID NO: 743); 2PD71 (SEQ ID NO: 744); 2PD-152 (SEQ ID NO: 745); 2PD-12 (SEQ ID NO: 746); 3PD55 (SEQ ID NO: 747); 3PD82 (SEQ ID NO: 748); 2PD8 (SEQ ID NO: 749); 2PD27 (SEQ ID NO: 750); 2PD82 (SEQ ID NO: 751); or 3PD36 (SEQ ID NO: 752).

[0309] In some embodiments, the PD-1 targeting moiety comprises an amino acid sequence selected from SEQ ID NOs: 739-752 (provided above) without the terminal histidine tag sequence (i.e., HHHHHH; SEQ ID NO: 393).

[0310] In some embodiments, the PD-1 targeting moiety comprises an amino acid sequence selected from SEQ ID NOs: 739-752 (provided above) without the HA tag (i.e., YPYDVPDYGS; SEQ ID NO: 394).

[0311] In some embodiments, the PD-1 targeting moiety comprises an amino acid sequence selected from SEQ ID NOs: 739-752 (provided above) without the AAA linker (i.e., AAA).

[0312] In some embodiments, the PD-1 targeting moiety comprises an amino acid sequence selected from SEQ ID NOs: 739-752 (provided above) without the AAA linker, HA tag, and terminal histidine tag sequence (i.e., AAAYPYDVPDYGSHHHHHH; SEQ ID NO: 395).

[0313] In some embodiments, the present technology contemplates the use of any natural or synthetic analogs, mutants, variants, alleles, homologs and orthologs (herein collectively referred to as “analogs”) of the PD-1 targeting moiety described herein. In some embodiments, the amino acid sequence of the PD1 targeting moiety further includes an amino acid analog, an amino acid derivative, or other non-classical amino acids.

[0314] In some embodiments, the PD-1 targeting moiety comprises the anti-PD-1 antibody pembrolizumab (aka MK-3475, KEYTRUDA), or fragments thereof. Pembrolizumab and other humanized anti-PD-1 antibodies are disclosed in Hamid, et al. (2013) New England Journal of Medicine 369 (2): 134-44, U.S. Pat. No. 8,354,509, and WO 2009/114335, the entire disclosures of which are hereby incorporated by reference. In illustrative embodiments, pembrolizumab or an antigen-binding fragment thereof for use in the methods provided herein comprises a heavy chain comprising the amino acid sequence of SEQ ID NO: 753; and/or a light chain comprising the amino acid sequence of (SEQ ID NO: 754).

[0315] In an embodiment, the PD-1 targeting moiety comprises the anti-PD-1 antibody, nivolumab (aka BMS-936558, MDX-1106, ONO-4538, OPDIVO), or fragments thereof. Nivolumab (clone 5C4) and other human monoclonal antibodies that specifically bind to PD-1 are disclosed in U.S. Pat. No. 8,008,449 and WO 2006/121168, the entire disclosures of which are hereby incorporated by reference. In illustrative embodiments, nivolumab or an antigen-binding fragment thereof comprises a heavy chain comprising the amino acid sequence of SEQ ID NO: 755; and/or a light chain comprising the amino acid sequence of (SEQ ID NO: 756).

[0316] In an embodiment, the PD-1 targeting moiety comprises the anti-PD-1 antibody pidilizumab (aka CT-011, hBAT or hBAT-1), or fragments thereof. Pidilizumab and other humanized anti-PD-I monoclonal antibodies are disclosed in US 2008/0025980 and WO 2009/101611, the entire disclosures of which are hereby incorporated by reference. In illustrative embodiments, the anti-PD-1 antibody or an antigen-binding fragment thereof for use in the methods provided herein comprises a light chain variable regions comprising an amino acid sequence selected from SEQ ID NOS: 15-18 of US 2008/0025980 (SEQ ID Nos: 757-760 of this application); and/or a heavy chain comprising an amino acid sequence selected from SEQ ID NOS: 20-24 of US 2008/0025980 (SEQ ID Nos: 761-765 of this application).

[0317] In an embodiment, the targeting moiety comprises a light chain comprising SEQ ID NO: 18 of US 2008/0025980 (SEQ ID NO: 760) and a heavy chain comprising SEQ ID NO: 22 of US 2008/0025980 (SEQ ID NO: 763).

[0318] In an embodiment, the PD-1 targeting moiety comprises AMP-514 (aka MEDI-0680).

[0319] In an embodiment, the PD-1 targeting moiety comprises the PD-L2-Fc fusion protein AMP-224, which is disclosed in WO2010/027827 and WO 2011/066342, the entire disclosures of which are hereby incorporated by reference. In such an embodiment, the targeting moiety may include a targeting domain which comprises SEQ ID NO: 4 of WO2010/027827 (SEQ ID NO: 766 of this application) and/or the B7-DC fusion protein which comprises SEQ ID NO:83 of WO2010/027827 (SEQ ID NO: 767 of this application).

[0320] In an embodiment, the PD-1 targeting moiety comprises the peptide AUNP 12 or any of the other peptides disclosed in US 2011/0318373 or 8,907,053. For example, the targeting moiety may comprise AUNP 12 (i.e., Compound 8 or SEQ ID NO:49 of US 2011/0318373) which has the sequence of:

[chemical structure]

[0321] In an embodiment, the PD-1 targeting moiety comprises the anti-PD-1 antibody 1E3, or fragments thereof, as disclosed in US 2014/0044738, the entire disclosures of which are hereby incorporated by reference. In illustrative embodiments, 1E3 or an antigen-binding fragment thereof for use in the methods provided herein comprises a heavy chain variable region comprising the amino acid sequence of SEQ ID NO: 768; and/or a light chain variable region comprising the amino acid sequence of SEQ ID NO: 769.

[0322] In an embodiment, the PD-1 targeting moiety comprises the anti-PD-1 antibody 1E8, or fragments thereof, as disclosed in US 2014/0044738, the entire disclosures of which are hereby incorporated by reference. In illustrative embodiments, 1E8 or an antigen-binding fragment thereof for use in the methods provided herein comprises a heavy chain variable region comprising the amino acid sequence of SEQ ID NO: 770; and/or a light chain variable region comprising the amino acid sequence of SEQ ID NO: 771.

[0323] In an embodiment, the PD-1 targeting moiety comprises the anti-PD-1 antibody 1H3, or fragments thereof, as disclosed in US 2014/0044738, the entire disclosures of which are hereby incorporated by reference. In illustrative embodiments, 1H3 or an antigen-binding fragment thereof for use in the methods provided herein comprises a heavy chain variable region comprising the amino acid sequence of SEQ ID NO: 772; and/or light chain variable region comprising the amino acid sequence of SEQ ID NO: 773.

[0324] In an embodiment, the PD-1 targeting moiety comprises a VHH directed against PD-1 as disclosed, for example, in U.S. Pat. No. 8,907,065 and WO 2008/071447, the entire disclosures of which are hereby incorporated by reference. In illustrative embodiments, the VHHs against PD-1 comprise SEQ ID NOS: 347-351 of U.S. Pat. No. 8,907,065 (SEQ ID Nos: 774-778).

[0325] In an embodiment, the PD-1 targeting moiety comprises any one of the anti-PD-1 antibodies, or fragments thereof, as disclosed in US2011/0271358 and WO2010/036959, the entire contents of which are hereby incorporated by reference. In illustrative embodiments, the antibody or an antigen-binding fragment thereof for use in the methods provided herein comprises a heavy chain comprising an amino acid sequence selected from SEQ ID NOS: 25-29 of US2011/0271358 (SEQ ID Nos: 779-783 of this application); and/or a light chain comprising an amino acid sequence selected from SEQ ID NOS: 30-33 of US2011/0271358 (SEQ ID Nos: 784-787 of this application).

[0326] In some embodiments, the PD-1 targeting moiety is an antibody directed against PD-1, or an antibody fragment thereof, selected from TSR-042 (Tesaro, Inc.), REGN2810 (Regeneron Pharmaceuticals, Inc.), PDR001 (Novartis Pharmaceuticals), and BGB-A317 (BeiGene Ltd.)

### PD-L1 Targeting Moieties

[0327] In some embodiments, the targeting moiety is a PD-L1 targeting moiety. Programmed death-ligand 1 (PD-L1) also known as cluster of differentiation 274 (CD274) or B7 homolog 1 (B7-H1) is a type 1 transmembrane protein that has been speculated to play a major role in suppressing the immune system. PD-L1 is upregulated on macrophages and dendritic cells (DC) in response to LPS and GM-CSF treatment, and on T cells and B cells upon TCR and B cell receptor signaling.

[0328] In various embodiments, the PD-L1 targeting moiety comprises an antigen recognition domain that recognizes an epitope present on PD-L1. In an embodiment, the antigen-recognition domain recognizes one or more linear epitopes present on PD-L1. In some embodiment, a linear epitope refers to any continuous sequence of amino acids present on PD-L1. In another embodiment, the antigen-recognition domain recognizes one or more conformational epitopes present on PD-L1. As used herein, a conformation epitope refers to one or more sections of amino acids (which may be discontinuous) which form a three-dimensional surface with features and/or shapes and/or tertiary structures capable of being recognized by an antigen recognition domain.

[0329] In various embodiments, the PD-L1 targeting moiety may bind to the full-length and/or mature forms and/or isoforms and/or splice variants and/or fragments and/or any other naturally occurring or synthetic analogs, variants, or mutants of human PD-L1. In various embodiments, the PD-L1 targeting moiety may bind to any forms of the human PD-L1. In an embodiment, the PD-L1 targeting moiety binds to a phosphorylated form of PD-L1. In an embodiment, the PD-L1 targeting moiety binds to an acetylated form of PD-L1.

[0330] In an embodiment, the PD-L1 targeting moiety comprises an antigen recognition domain that recognizes one or more epitopes present on human PD-L1. In an embodiment, the human PD-L1 comprises the amino acid sequence of (signal peptide underlined):

Isoform 1:
(SEQ ID NO: 788)
MRIFAVFIFMTYWHLLNAFTVTVPKDLYVVEYGSNMTIECKFPVEKQLDL
AALIVYWEMEDKNIIQFVHGEEDLKVQHSSYRQRARLLKDQLSLGNAALQ
ITDVKLQDAGVYRCMISYGGADYKRITVKVNAPYNKINQRILVVDPVTSE
HELTCQAEGYPKAEVIWTSSDHQVLSGKTTTTNSKREEKLFNVTSTLRIN
TTTNEIFYCTFRRLDPEENHTAELVIPELPLAHPPNERTHLVILGAILLC
LGVALTFIFRLRKGRMMDVKKCGIQDTNSKKQSDTHLEET;
Isoform 2:
(SEQ ID NO: 789)
MRIFAVFIFMTYWHLLNAPYNKINQRILVVDPVTSEHELTCQAEGYPKAE
VIWTSSDHQVLSGKTTTTNSKREEKLFNVTSTLRINTTTNEIFYCTFRRL
DPEENHTAELVIPELPLAHPPNERTHLVILGAILLCLGVALTFIFRLRKG
RMMDVKKCGIQDTNSKKQSDTHLEET;
or
Isoform 3:
(SEQ ID NO: 790)
MRIFAVFIFMTYWHLLNAFTVTVPKDLYVVEYGSNMTIECKFPVEKQLDL
AALIVYWEMEDKNIIQFVHGEEDLKVQHSSYRQRARLLKDQLSLGNAALQ
ITDVKLQDAGVYRCMISYGGADYKRITVKVNAPYNKINQRILVVDPVTSE
HELTCQAEGYPKAEVIWTSSDHQVLSGD.

[0331] In various embodiments, the PD-L1 targeting moiety is capable of specific binding. In various embodiments, the PD-L1 targeting moiety comprises an antigen recognition domain such as an antibody or derivatives thereof. In an embodiment, the PD-L1 targeting moiety comprises an antibody.

[0332] In some embodiments, the PD-L1 targeting moiety comprises an antibody derivative or format. In some embodiments, the PD-L1 targeting moiety comprises a single-domain antibody, a recombinant heavy-chain-only antibody (VHH), a single-chain antibody (scFv), a shark heavy-chain-only antibody (VNAR), a microprotein (cysteine knot protein, knottin), a DARPin; a Tetranectin; an Affibody; a Transbody; an Anticalin; an AdNectin; an alphabody; a bicyclic peptide; an Affilin; an Affimer, a Microbody; an aptamer; an alterase; a plastic antibody; a phylomer; a stradobody; a maxibody; an evibody; a fynomer, an armadillo repeat protein, a Kunitz domain, an avimer, an atrimer, a probody, an immunobody, a triomab, a troybody; a pepbody; a vaccibody, a UniBody; a DuoBody, a Fv, a Fab, a Fab′, a F(ab′)₂, a peptide mimetic molecule, or a small (e.g. synthetic or natural) molecule, e.g. without limitation, as described in US Patent Nos. or Patent Publication Nos. U.S. Pat. No. 7,417,130, US 2004/132094, U.S. Pat. No. 5,831,012, US 2004/023334, U.S. Pat. Nos. 7,250,297, 6,818,418, US 2004/209243, U.S. Pat. Nos. 7,838,629, 7,186,524, 6,004,746, 5,475,096, US 2004/146938, US 2004/157209, U.S. Pat. Nos. 6,994,982, 6,794,144, US 2010/239633, U.S. Pat. No. 7,803,907, US 2010/119446, and/or U.S. Pat. No. 7,166,697, the contents of which are hereby incorporated by reference in their entireties. See also, Storz MAbs. 2011 May-June; 3(3): 310-317.

[0333] In some embodiments, the PD-L1 targeting moiety comprises a single-domain antibody, such as a VHH. The VHH may be derived from, for example, an organism that produces VHH antibody such as a camelid, a shark, or the VHH may be a designed VHH. VHHs are antibody-derived therapeutic proteins that contain the unique structural and functional properties of naturally-occurring heavy-chain antibodies. VHH technology is based on fully functional antibodies from camelids that lack light chains. These heavy-chain antibodies contain a single variable domain (V_{H}H) and two constant domains (CH2 and CH3).

[0334] In an embodiment, the PD-L1 targeting moiety comprises a VHH. In some embodiments, the VHH is a humanized VHH or camelized VHH.

[0335] In some embodiments, the VHH comprises a fully human V_{H} domain, e.g. a HUMABODY (Crescendo Biologics, Cambridge, UK). In some embodiments, fully human V_{H} domain, e.g. a HUMABODY is monovalent, bivalent, or trivalent. In some embodiments, the fully human V_{H} domain, e.g. a HUMABODY is mono- or multi-specific such as monospecific, bispecific, or trispecific. Illustrative fully human V_{H} domains, e.g. HUMABODIES are described in, for example, WO2016/113555 and WO2016/113557, the entire disclosure of which is incorporated by reference.

[0336] In some embodiments, the PD-L1 targeting moiety comprises a VHH comprising a single amino acid chain having four “framework regions” or FRs and three “complementary determining regions” or CDRs. As used herein, “framework region” or “FR” refers to a region in the variable domain which is located between the CDRs. As used herein, “complementary determining region” or “CDR” refers to variable regions in VHHs that contains the amino acid sequences capable of specifically binding to antigenic targets.

[0337] In various embodiments, the PD-L1 targeting moiety comprises a VHH having a variable domain comprising at least one CDR1, CDR2, and/or CDR3 sequences. In various embodiments, the PD-L1 targeting moiety comprises a VHH having a variable region comprising at least one FR1, FR2, FR3, and FR4 sequences.

[0338] In some embodiments, the CDR1 sequence is selected from SEQ ID Nos.: 791-821.

[0339] In some embodiments, the CDR2 sequence is selected from SEQ ID Nos.: 822-852.

[0340] In some embodiments, the CDR3 sequence is selected from SEQ ID Nos.: 853-883.

[0341] In various exemplary embodiments, the PD-L1 targeting moiety comprises an amino acid sequence selected from the following sequences: 2LIG2 (SEQ ID NO: 884); 2LIG3 (SEQ ID NO: 885); 2LIG16 (SEQ ID NO: 886); 2LIG22 (SEQ ID NO: 887); 2LIG27 (SEQ ID NO: 888); 2LIG29 (SEQ ID NO: 889); 2LIG30 (SEQ ID NO: 890); 2LIG34 (SEQ ID NO: 891); 2LIG35 (SEQ ID NO: 892); 2LIG48 (SEQ ID NO: 893); 2LIG65 (SEQ ID NO: 894); 2LIG85 (SEQ ID NO: 895); 2LIG86 (SEQ ID NO: 896); 2LIG89 (SEQ ID NO: 897); 2LIG97 (SEQ ID NO: 898); 2LIG99 (SEQ ID NO: 899); 2LIG109 (SEQ ID NO: 900); 2LIG127 (SEQ ID NO: 901); 2LIG139 (SEQ ID NO: 902); 2LIG176 (SEQ ID NO: 903); 2LIG189 (SEQ ID NO: 904); 3LIG3 (SEQ ID NO: 905); 3LIG7 (SEQ ID NO: 906); 3LIG8 (SEQ ID NO: 907); 3LIG9 (SEQ ID NO: 908); 3LIG18 (SEQ ID NO: 909); 3LIG20 (SEQ ID NO: 910); 3LIG28 (SEQ ID NO: 911); 3LIG29 (SEQ ID NO: 912); 3LIG30 (SEQ ID NO: 913); or 3LIG33 (SEQ ID NO: 914).

[0342] In some embodiments, the PD-L1 targeting moiety comprises an amino acid sequence selected from SEQ ID NOs: 884-914 (provided above) without the terminal histidine tag sequence (i.e., HHHHHH; SEQ ID NO: 393).

[0343] In some embodiments, the PD-L1 targeting moiety comprises an amino acid sequence selected from SEQ ID NOs: 884-914 (provided above) without the HA tag (i.e., YPYDVPDYGS; SEQ ID NO: 394).

[0344] In some embodiments, the PD-L1 targeting moiety comprises an amino acid sequence selected from SEQ ID NOs: 884-914 (provided above) without the AAA linker (i.e., AAA).

[0345] In some embodiments, the PD-L1 targeting moiety comprises an amino acid sequence selected from SEQ ID NOs: 884-914 (provided above) without the AAA linker, HA tag, and terminal histidine tag sequence (i.e., AAAYPYDVPDYGSHHHHHH; SEQ ID NO: 395).

[0346] In an embodiment, the PD-L1 targeting moiety comprises the anti-PD-L1 antibody MEDI4736 (aka durvalumab), or fragments thereof. MEDI4736 is selective for PD-L1 and blocks the binding of PD-L1 to the PD-1 and CD80 receptors. MEDI4736 and antigen-binding fragments thereof for use in the methods provided herein comprises a heavy chain and a light chain or a heavy chain variable region and a light chain variable region. The sequence of MEDI4736 is disclosed in WO/2016/06272, the entire contents of which are hereby incorporated by reference. In illustrative embodiments, MEDI4736 or an antigen-binding fragment thereof for use in the methods provided herein comprises a heavy chain comprising the amino acid sequence of SEQ ID NO: 915; and/or a light chain comprising the amino acid sequence of SEQ ID NO: 916.

[0347] In illustrative embodiments, the MEDI4736 or an antigen-binding fragment thereof for use in the methods provided herein comprises a heavy chain variable region comprising the amino acid sequence of SEQ ID NO: 4 of WO/2016/06272 (SEQ ID NO: 917); and/or a light chain variable region comprising the amino acid sequence of SEQ ID NO: 3 of WO/2016/06272 (SEQ ID NO: 918).

[0348] In an embodiment, the PD-L1 targeting moiety comprises the anti-PD-L1 antibody atezolizumab (aka MPDL3280A, RG7446), or fragments thereof. In illustrative embodiments, atezolizumab or an antigen-binding fragment thereof for use in the methods provided herein comprises a heavy chain comprising the amino acid sequence of SEQ ID NO: 919; and/or a light chain comprising the amino acid sequence of SEQ ID NO: 920.

[0349] In an embodiment, the PD-L1 targeting moiety comprises the anti-PD-L1 antibody avelumab (aka MSB0010718C), or fragments thereof. In illustrative embodiments, avelumab or an antigen-binding fragment thereof for use in the methods provided herein comprises a heavy chain comprising the amino acid sequence of SEQ ID NO: 921; and/or a light chain comprising the amino acid sequence of SEQ ID NO: 922.

[0350] In an embodiment, the PD-L1 targeting moiety comprises the anti-PD-L1 antibody BMS-936559 (aka 12A4, MDX-1105), or fragments thereof, as disclosed in US 2013/0309250 and WO2007/005874, the entire disclosures of which are hereby incorporated by reference. In illustrative embodiments, BMS-936559 or an antigen-binding fragment thereof for use in the methods provided herein comprises a heavy chain variable region comprising the amino acid sequence of SEQ ID NO: 923; and/or a light chain variable region comprising the amino acid sequence of SEQ ID NO: 924.

[0351] In an embodiment, the PD-L1 targeting moiety comprises the anti-PD-L1 antibody 3G10, or fragments thereof, as disclosed in US 2013/0309250 and WO2007/005874, the entire disclosures of which are hereby incorporated by reference. In illustrative embodiments, 3G10 or an antigen-binding fragment thereof for use in the methods provided herein comprises a heavy chain variable region comprising the amino acid sequence of SEQ ID NO: 925; and/or a light chain variable region comprising the amino acid sequence of SEQ ID NO: 926.

[0352] In an embodiment, the PD-L1 targeting moiety comprises the anti-PD-L1 antibody 10A5, or fragments thereof, as disclosed in US 2013/0309250 and WO2007/005874, the entire disclosures of which are hereby incorporated by reference. In illustrative embodiments, 10A5 or an antigen-binding fragment thereof for use in the methods provided herein comprises a heavy chain variable region comprising the amino acid sequence of SEQ ID NO: 927; and/or a light chain variable region comprising the amino acid sequence of SEQ ID NO: 928.

[0353] In an embodiment, the PD-L1 targeting moiety comprises the anti-PD-L1 antibody 5F8, or fragments thereof, as disclosed in US 2013/0309250 and WO2007/005874, the entire disclosures of which are hereby incorporated by reference. In illustrative embodiments, 5F8 or an antigen-binding fragment thereof for use in the methods provided herein comprises a heavy chain variable region comprising the amino acid sequence of SEQ ID NO: 929; and/or a light chain variable region comprising the amino acid sequence of SEQ ID NO: 930.

[0354] In an embodiment, the PD-L1 targeting moiety comprises the anti-PD-L1 antibody 10H10, or fragments thereof, as disclosed in US 2013/0309250 and WO2007/005874, the entire disclosures of which are hereby incorporated by reference. In illustrative embodiments, 10H10 or an antigen-binding fragment thereof for use in the methods provided herein comprises a heavy chain variable region comprising the amino acid sequence of SEQ ID NO: 931; and/or a light chain variable region comprising the amino acid sequence of SEQ ID NO: 932.

[0355] In an embodiment, PD-L1 the targeting moiety comprises the anti-PD-L1 antibody 1B12, or fragments thereof, as disclosed in US 2013/0309250 and WO2007/005874, the entire disclosures of which are hereby incorporated by reference. In illustrative embodiments, 1B12 or an antigen-binding fragment thereof for use in the methods provided herein comprises a heavy chain variable region comprising the amino acid sequence of SEQ ID NO: 933; and/or a light chain variable region comprising the amino acid sequence of SEQ ID NO: 934.

[0356] In an embodiment, the PD-L1 targeting moiety comprises the anti-PD-L1 antibody 7H1, or fragments thereof, as disclosed in US 2013/0309250 and WO2007/005874, the entire disclosures of which are hereby incorporated by reference. In illustrative embodiments, 7H1 or an antigen-binding fragment thereof for use in the methods provided herein comprises a heavy chain variable region comprising the amino acid sequence of SEQ ID NO: 935; and/or a light chain variable region comprising the amino acid sequence of SEQ ID NO: 936.

[0357] In an embodiment, the PD-L1 targeting moiety comprises the anti-PD-L1 antibody 11E6, or fragments thereof, as disclosed in US 2013/0309250 and WO2007/005874, the entire disclosures of which are hereby incorporated by reference. In illustrative embodiments, 11E6 or an antigen-binding fragment thereof for use in the methods provided herein comprises a heavy chain variable region comprising the amino acid sequence of SEQ ID NO: 937; and/or a light chain variable region comprising the amino acid sequence of SEQ ID NO: 938.

[0358] In an embodiment, the PD-L1 targeting moiety comprises the anti-PD-L1 antibody 12B7, or fragments thereof, as disclosed in US 2013/0309250 and WO2007/005874, the entire disclosures of which are hereby incorporated by reference. In illustrative embodiments, 12B7 or an antigen-binding fragment thereof for use in the methods provided herein comprises a heavy chain variable region comprising the amino acid sequence of SEQ ID NO: 939; and/or a light chain variable region comprising the amino acid sequence of SEQ ID NO: 940.

[0359] In an embodiment, the PD-L1 targeting moiety comprises the anti-PD-L1 antibody 13G4, or fragments thereof, as disclosed in US 2013/0309250 and WO2007/005874, the entire disclosures of which are hereby incorporated by reference. In illustrative embodiments, 13G4 or an antigen-binding fragment thereof for use in the methods provided herein comprises a heavy chain variable region comprising the amino acid sequence of SEQ ID NO: 941; and/or a light chain variable region comprising the amino acid sequence of SEQ ID NO: 942.

[0360] In an embodiment, the PD-L1 targeting moiety comprises the anti-PD-L1 antibody 1E12, or fragments thereof, as disclosed in US 2014/0044738, the entire disclosures of which are hereby incorporated by reference. In illustrative embodiments, 1E12 or an antigen-binding fragment thereof for use in the methods provided herein comprises a heavy chain variable region comprising the amino acid sequence of SEQ ID NO: 943; and/or a light chain variable region comprising the amino acid sequence of SEQ ID NO: 944.

[0361] In an embodiment, the PD-L1 targeting moiety comprises the anti-PD-L1 antibody 1F4, or fragments thereof, as disclosed in US 2014/0044738, the entire disclosures of which are hereby incorporated by reference. In illustrative embodiments, 1F4 or an antigen-binding fragment thereof for use in the methods provided herein comprises a heavy chain variable region comprising the amino acid sequence of SEQ ID NO: 945; and/or a light chain variable region comprising the amino acid sequence of SEQ ID NO: 946.

[0362] In an embodiment, the PD-L1 targeting moiety comprises the anti-PD-L1 antibody 2G11, or fragments thereof, as disclosed in US 2014/0044738, the entire disclosures of which are hereby incorporated by reference. In illustrative embodiments, 2G11 or an antigen-binding fragment thereof for use in the methods provided herein comprises a heavy chain variable region comprising the amino acid sequence of SEQ ID NO: 947; and/or a light chain variable region comprising the amino acid sequence of SEQ ID NO: 948.

[0363] In an embodiment, the PD-L1 targeting moiety comprises the anti-PD-L1 antibody 3B6, or fragments thereof, as disclosed in US 2014/0044738, the entire disclosures of which are hereby incorporated by reference. In illustrative embodiments, 3B6 or an antigen-binding fragment thereof for use in the methods provided herein comprises a heavy chain variable region comprising the amino acid sequence of SEQ ID NO: 949; and/or a light chain variable region comprising the amino acid sequence of SEQ ID NO: 950.

[0364] In an embodiment, the PD-L1 targeting moiety comprises the anti-PD-L1 antibody 3D10, or fragments thereof, as disclosed in US 2014/0044738 and WO2012/145493, the entire disclosures of which are hereby incorporated by reference. In illustrative embodiments, 3D10 or an antigen-binding fragment thereof for use in the methods provided herein comprises a heavy chain variable region comprising the amino acid sequence of SEQ ID NO: 951; and/or a light chain variable region comprising the amino acid sequence of SEQ ID NO: 952.

[0365] In an embodiment, the PD-L1 targeting moiety comprises any one of the anti-PD-L1 antibodies disclosed in US2011/0271358 and WO2010/036959, the entire contents of which are hereby incorporated by reference. In illustrative embodiments, the antibody or an antigen-binding fragment thereof for use in the methods provided herein comprises a heavy chain comprising an amino acid sequence selected from SEQ ID Nos: 34-38 of US2011/0271358 (SEQ ID Nos.: 953-957) and/or a light chain comprising an amino acid sequence selected from SEQ ID Nos: 39-42 of US2011/0271358 (SEQ ID Nos.: 958-961).

[0366] In an embodiment, the PD-L1 targeting moiety comprises the anti-PD-L1 antibody 2.7A4, or fragments thereof, as disclosed in WO 2011/066389, U.S. Pat. No. 8,779,108, and US2014/0356353, the entire disclosures of which are hereby incorporated by reference. In illustrative embodiments, 2.7A4 or an antigen-binding fragment thereof for use in the methods provided herein comprises a heavy chain variable region comprising the amino acid sequence of SEQ ID No: 2 of WO 2011/066389 (SEQ ID NO: 962); and/or a light chain variable region comprising the amino acid sequence of SEQ ID No: 7 of WO 2011/066389 (SEQ ID NO: 963).

[0367] In an embodiment, the PD-L1 targeting moiety comprises the anti-PD-L1 antibody 2.9D10, or fragments thereof, as disclosed in WO 2011/066389, U.S. Pat. No. 8,779,108, and US2014/0356353, the entire disclosures of which are hereby incorporated by reference. In illustrative embodiments, 2.9D10 or an antigen-binding fragment thereof for use in the methods provided herein comprises a heavy chain variable region comprising the amino acid sequence of SEQ ID No: 12 of WO 2011/066389 (SEQ ID NO: 964); and/or a light chain variable region comprising the amino acid sequence of SEQ ID No: 17 of WO 2011/066389 (SEQ ID NO: 965).

[0368] In an embodiment, the PD-L1 targeting moiety comprises the anti-PD-L1 antibody 2.14H9, or fragments thereof, as disclosed in WO 2011/066389, U.S. Pat. No. 8,779,108, and US2014/0356353, the entire disclosures of which are hereby incorporated by reference. In illustrative embodiments, 2.14H9 or an antigen-binding fragment thereof for use in the methods provided herein comprises a heavy chain variable region comprising the amino acid sequence of SEQ ID No: 22 of WO 2011/066389 (SEQ ID NO: 966); and/or a light chain variable region comprising the amino acid sequence of SEQ ID No: 27 of WO 2011/066389 (SEQ ID NO: 967).

[0369] In an embodiment, the PD-L1 targeting moiety comprises the anti-PD-L1 antibody 2.20A8, or fragments thereof, as disclosed in WO 2011/066389, U.S. Pat. No. 8,779,108, and US2014/0356353, the entire disclosures of which are hereby incorporated by reference. In illustrative embodiments, 2.20A8 or an antigen-binding fragment thereof for use in the methods provided herein comprises a heavy chain variable region comprising the amino acid sequence of SEQ ID No: 32 of WO 2011/066389 (SEQ ID NO: 968); and/or a light chain variable region comprising the amino acid sequence of SEQ ID No: 37 of WO 2011/066389 (SEQ ID NO: 969).

[0370] In an embodiment, the PD-L1 targeting moiety comprises the anti-PD-L1 antibody 3.15G8, or fragments thereof, as disclosed in WO 2011/066389, U.S. Pat. No. 8,779,108, and US2014/0356353, the entire disclosures of which are hereby incorporated by reference. In illustrative embodiments, 3.15G8 or an antigen-binding fragment thereof for use in the methods provided herein comprises a heavy chain variable region comprising the amino acid sequence of SEQ ID No: 42 of WO 2011/066389 (SEQ ID NO: 970); and/or a light chain variable region comprising the amino acid sequence of SEQ ID No: 47 of WO 2011/066389 (SEQ ID NO: 971).

[0371] In an embodiment, the PD-L1 targeting moiety comprises the anti-PD-L1 antibody 3.18G1, or fragments thereof, as disclosed in WO 2011/066389, U.S. Pat. No. 8,779,108, and US2014/0356353, the entire disclosures of which are hereby incorporated by reference. In illustrative embodiments, 3.18G1 or an antigen-binding fragment thereof for use in the methods provided herein comprises a heavy chain variable region comprising the amino acid sequence of SEQ ID No: 52 of WO 2011/066389 (SEQ ID NO: 972); and/or a light chain variable region comprising the amino acid sequence of SEQ ID No: 57 of WO 2011/066389 (SEQ ID NO: 973).

[0372] In an embodiment, the PD-L1 targeting moiety comprises the anti-PD-L1 antibody 2.7A40PT, or fragments thereof, as disclosed in WO 2011/066389, U.S. Pat. No. 8,779,108, and US2014/0356353, and US2014/0356353, the entire disclosures of which are hereby incorporated by reference. In illustrative embodiments, 2.7A4OPT or an antigen-binding fragment thereof for use in the methods provided herein comprises a heavy chain variable region comprising the amino acid sequence of SEQ ID No: 62 of WO 2011/066389 (SEQ ID NO: 974); and/or a light chain variable region comprising the amino acid sequence of SEQ ID No: 67 of WO 2011/066389 (SEQ ID NO: 975).

[0373] In an embodiment, the PD-L1 targeting moiety comprises the anti-PD-L1 antibody 2.14H90PT, or fragments thereof, as disclosed in WO 2011/066389, U.S. Pat. No. 8,779,108, and US2014/0356353, the entire disclosures of which are hereby incorporated by reference. In illustrative embodiments, 2.14H90PT or an antigen-binding fragment thereof for use in the methods provided herein comprises a heavy chain variable region comprising the amino acid sequence of SEQ ID No: 72 of WO 2011/066389 (SEQ ID NO: 976); and/or alight chain variable region comprising the amino acid sequence of SEQ ID No: 77 of WO 2011/066389 (SEQ ID NO: 977).

[0374] In an embodiment, the PD-L1 targeting moiety comprises any one of the anti-PD-L1 antibodies disclosed in WO2016/061142, the entire contents of which are hereby incorporated by reference. In illustrative embodiments, the antibody or an antigen-binding fragment thereof for use in the methods provided herein comprises a heavy chain comprising an amino acid sequence selected from SEQ ID Nos: 18, 30, 38, 46, 50, 54, 62, 70, and 78 of WO2016/061142 (SEQ ID Nos.: 978, 979, 980, 981, 982, 983, 984, 985, and 986, respectively); and/or a light chain comprising an amino acid sequence selected from SEQ ID Nos: 22, 26, 34, 42, 58, 66, 74, 82, and 86 of WO2016/061142 (SEQ ID Nos.: 987, 988, 989, 990, 991, 992, 993, 994, and 995, respectively).

[0375] In an embodiment, the PD-L1 targeting moiety comprises any one of the anti-PD-L1 antibodies disclosed in WO2016/022630, the entire contents of which are hereby incorporated by reference. In illustrative embodiments, the antibody or an antigen-binding fragment thereof for use in the methods provided herein comprises a heavy chain comprising an amino acid sequence selected from SEQ ID Nos: 2, 6, 10, 14, 18, 22, 26, 30, 34, 38, 42, and 46 of WO2016/022630 (SEQ ID Nos.: 996, 997, 998, 999, 1000, 1001, 1002, 1003, 1004, 1005, 1006, and 1007, respectively); and/or a light chain comprising an amino acid sequence selected from SEQ ID Nos: 4, 8, 12, 16, 20, 24, 28, 32, 36, 40, 44, and 48 of WO2016/022630 (SEQ ID Nos.: 1008, 1009, 1010, 1011, 1012, 1013, 1014, 1015, 1016, 1017, 1018, and 1019, respectively).

[0376] In an embodiment, the PD-L1 targeting moiety comprises any one of the anti-PD-L1 antibodies disclosed in WO2015/112900, the entire contents of which are hereby incorporated by reference. In illustrative embodiments, the antibody or an antigen-binding fragment thereof for use in the methods provided herein comprises a heavy chain comprising an amino acid sequence selected from SEQ ID Nos: 38, 50, 82, and 86 of WO 2015/112900 (SEQ ID Nos.: 1020, 1021, 1022, and 1023, respectively); and/or alight chain comprising an amino acid sequence selected from SEQ ID Nos: 42, 46, 54, 58, 62, 66, 70, 74, and 78 of WO 2015/112900 (SEQ ID Nos.: 1024, 1025, 1026, 1027, 1028, 1029, 1030, 1031, and 1032, respectively).

[0377] In an embodiment, the PD-L1 targeting moiety comprises any one of the anti-PD-L1 antibodies disclosed in WO 2010/077634 and U.S. Pat. No. 8,217,149, the entire disclosures of which are hereby incorporated by reference. In illustrative embodiments, the anti-PD-L1 antibody or an antigen-binding fragment thereof for use in the methods provided herein comprises a heavy chain region comprising the amino acid sequence of SEQ ID No: 20 of WO 2010/077634 (SEQ ID NO: 1033); and/or a light chain variable region comprising the amino acid sequence of SEQ ID No: 21 of WO 2010/077634 (SEQ ID NO: 1034). In an embodiment, the PD-L1 targeting moiety comprises any one of the anti-PD-L1 antibodies obtainable from the hybridoma accessible under CNCM deposit numbers CNCM I-4122, CNCM I-4080 and CNCM I-4081 as disclosed in US 20120039906, the entire disclosures of which are hereby incorporated by reference.

[0378] In an embodiment, the PD-L1 targeting moiety comprises a VHH directed against PD-L1 as disclosed, for example, in U.S. Pat. No. 8,907,065 and WO 2008/071447, the entire disclosures of which are hereby incorporated by reference. In illustrative embodiments, the VHHs against PD-L1 comprise SEQ ID NOS: 394-399 of U.S. Pat. No. 8,907,065 (SEQ ID NOS: 1035-1040, respectively).

### PD-L2 Targeting Moieties

[0379] In some embodiments, the targeting moiety is directed against PD-L2. In some embodiments, the targeting moiety selectively binds a PD-L2 polypeptide. In some embodiments, the PD-L2 targeting moiety comprises an antibody, an antibody derivative or format, a peptide or polypeptide, or a fusion protein that selectively binds a PD-L2 polypeptide.

[0380] In an embodiment, the PD-L2 targeting moiety comprises a VHH directed against PD-L2 as disclosed, for example, in U.S. Pat. No. 8,907,065 and WO 2008/071447, the entire disclosures of which are hereby incorporated by reference. In illustrative embodiments, the VHHs against PD-L2 comprise SEQ ID Nos: 449-455 of U.S. Pat. No. 8,907,065 (SEQ ID Nos: 1041-1047, respectively).

[0381] In an embodiment, the PD-L2 targeting moiety comprises any one of the anti-PD-L2 antibodies disclosed in US2011/0271358 and WO2010/036959, the entire contents of which are hereby incorporated by reference. In illustrative embodiments, the antibody or an antigen-binding fragment thereof for use in the methods provided herein comprises a heavy chain comprising an amino acid sequence selected from SEQ ID Nos: 43-47 of US2011/0271358 (SEQ ID Nos.: 1048-1052, respectively); and/or alight chain comprising an amino acid sequence selected from SEQ ID Nos: 48-51 of US2011/0271358 (SEQ ID Nos.: 1053-1056, respectively).

[0382] In some embodiments, the present technology contemplates the use of any natural or synthetic analogs, mutants, variants, alleles, homologs and orthologs (herein collectively referred to as “analogs”) of the PD-1, PD-L1, or PD-L2 targeting moieties described herein. In some embodiments, the amino acid sequence of the PD-1, PD-L1, or PD-L2 targeting moiety further includes an amino acid analog, an amino acid derivative, or other non-classical amino acids.

[0383] In various embodiments, the PD-1, PD-L1, or PD-L2 targeting moieties disclosed herein comprise a sequence that targets PD-1, PD-L1, or PD-L2 which is at least about 60%, at least about 61%, at least about 62%, at least about 63%, at least about 64%, at least about 65%, at least about 66%, at least about 67%, at least about 68%, at least about 69%, at least about 70%, at least about 71%, at least about 72%, at least about 73%, at least about 74%, at least about 75%, at least about 76%, at least about 77%, at least about 78%, at least about 79%, at least about 80%, at least about 81%, at least about 82%, at least about 83%, at least about 84%, at least about 85%, at least about 86%, at least about 87%, at least about 88%, at least about 89%, at least about 90%, at least about 91%, at least about 92%, at least about 93%, at least about 94%, at least about 95%, at least about 96%, at least about 97%, at least about 98%, at least about 99%, or 100% identical to any of the PD-1, PD-L1, and/or PD-L2 sequences disclosed herein (e.g. about 60%, or about 61%, or about 62%, or about 63%, or about 64%, or about 65%, or about 66%, or about 67%, or about 68%, or about 69%, or about 70%, or about 71%, or about 72%, or about 73%, or about 74%, or about 75%, or about 76%, or about 77%, or about 78%, or about 79%, or about 80%, or about 81%, or about 82%, or about 83%, or about 84%, or about 85%, or about 86%, or about 87%, or about 88%, or about 89%, or about 90%, or about 91%, or about 92%, or about 93%, or about 94%, or about 95%, or about 96%, or about 97%, or about 98%, about 99% or about 100% sequence identity with any of the PD-1, PD-L1, and/or PD-L2 sequences disclosed herein).

[0384] In various embodiments, the PD-1, PD-L1, or PD-L2 targeting moiety comprises a binding agent comprising an amino acid sequence having one or more amino acid mutations with respect to any one of the PD-1, PD-L1, or PD-L2 sequences disclosed herein. In various embodiments, the PD-1, PD-L1, or PD-L2 targeting moiety comprises a binding agent comprising an amino acid sequence having one, or two, or three, or four, or five, or six, or seen, or eight, or nine, or ten, or fifteen, or twenty amino acid mutations with respect to any one of the sequences disclosed herein. In some embodiments, the one or more amino acid mutations may be independently selected from substitutions, insertions, deletions, and truncations.

[0385] In some embodiments, the amino acid mutations are amino acid substitutions, and may include conservative and/or non-conservative substitutions.

[0386] “Conservative substitutions” may be made, for instance, on the basis of similarity in polarity, charge, size, solubility, hydrophobicity, hydrophilicity, and/or the amphipathic nature of the amino acid residues involved. The 20 naturally occurring amino acids can be grouped into the following six standard amino acid groups: (1) hydrophobic: Met, Ala, Val, Leu, Ile; (2) neutral hydrophilic: Cys, Ser, Thr; Asn, Gln; (3) acidic: Asp, Glu; (4) basic: His, Lys, Arg; (5) residues that influence chain orientation: Gly, Pro; and (6) aromatic: Trp, Tyr, Phe.

[0387] As used herein, “conservative substitutions” are defined as exchanges of an amino acid by another amino acid listed within the same group of the six standard amino acid groups shown above. For example, the exchange of Asp by Glu retains one negative charge in the so modified polypeptide. In addition, glycine and proline may be substituted for one another based on their ability to disrupt α-helices.

[0388] As used herein, “non-conservative substitutions” are defined as exchanges of an amino acid by another amino acid listed in a different group of the six standard amino acid groups (1) to (6) shown above.

[0389] In various embodiments, the substitutions may also include non-classical amino acids. Exemplary non-classical amino acids include, but are not limited to, selenocysteine, pyrrolysine, N-formylmethionine β-alanine, GABA and δ-Aminolevulinic acid, 4-aminobenzoic acid (PABA), D-isomers of the common amino acids, 2,4-diaminobutyric acid, α-amino isobutyric acid, 4-aminobutyric acid, Abu, 2-amino butyric acid, γ-Abu, ε-Ahx, 6-amino hexanoic acid, Aib, 2-amino isobutyric acid, 3-amino propionic acid, ornithine, norleucine, norvaline, hydroxyproline, sarcosme, citrulline, homocitrulline, cysteic acid, t-butylglycine, t-butylalanine, phenylglycine, cyclohexylalanine, β-alanine, fluoro-amino acids, designer amino acids such as p methyl amino acids, C α-methyl amino acids, N α-methyl amino acids, and amino acid analogs in general.

[0390] In various embodiments, the amino acid mutation may be in the CDRs of the targeting moiety (e.g., the CDR1, CDR2 or CDR3 regions). In another embodiment, amino acid alteration may be in the framework regions (FRs) of the targeting moiety (e.g., the FR1, FR2, FR3, or FR4 regions).

[0391] Modification of the amino acid sequences may be achieved using any known technique in the art e.g., site-directed mutagenesis or PCR based mutagenesis. Such techniques are described, for example, in Sambrook et al., Molecular Cloning: A Laboratory Manual, Cold Spring Harbor Press, Plainview, N.Y., 1989 and Ausubel et al., Current Protocols in Molecular Biology, John Wiley & Sons, New York, N.Y., 1989.

[0392] In various embodiments, the mutations do not substantially reduce the present PD-1, PD-L1, or PD-L2 targeting moiety's capability to specifically bind to PD-1, PD-L1, or PD-L2. In various embodiments, the mutations do not substantially reduce the PD-1, PD-L1, or PD-L2 targeting moiety's capability to specifically bind to PD-1, PD-L1, or PD-L2 and without functionally modulating (e.g., partially or fully neutralizing) PD-1, PD-L1, or PD-L2.

[0393] In various embodiments, the binding affinity of the PD-1, PD-L1, or PD-L2 targeting moiety for the full-length and/or mature forms and/or isoforms and/or splice variants and/or fragments and/or monomeric and/or dimeric forms and/or any other naturally occurring or synthetic analogs, variants, or mutants (including monomeric and/or dimeric forms) of human PD-1, PD-L1, or PD-L2 may be described by the equilibrium dissociation constant (K_{D}). In various embodiments, the PD-1, PD-L1, or PD-L2 targeting moiety binds to the full-length and/or mature forms and/or isoforms and/or splice variants and/or fragments and/or any other naturally occurring or synthetic analogs, variants, or mutants (including monomeric and/or dimeric forms) of human PD-1, PD-L1, or PD-L2 with a K_{D} of less than about 1 uM, about 900 nM, about 800 nM, about 700 nM, about 600 nM, about 500 nM, about 400 nM, about 300 nM, about 200 nM, about 100 nM, about 90 nM, about 80 nM, about 70 nM, about 60 nM, about 50 nM, about 40 nM, about 30 nM, about 20 nM, about 10 nM, or about 5 nM, or about 1 nM.

[0394] In some embodiments, the PD-1, PD-L1, and/or PD-L2 targeting moieties disclosed herein may comprise any combination of heavy chain, light chain, heavy chain variable region, light chain variable region, complementarity determining region (CDR), and framework region sequences that target PD-1, PD-L1, and/or PD-L2 as disclosed herein.

[0395] Additional antibodies, antibody derivatives or formats, peptides or polypeptides, or fusion proteins that selectively bind or target PD-1, PD-L1 and/or PD-L2 are disclosed in WO 2011/066389, US 2008/0025980, US 2013/0034559, U.S. Pat. No. 8,779,108, US 2014/0356353, U.S. Pat. No. 8,609,089, US 2010/028330, US 2012/0114649, WO 2010/027827, WO 2011/066342, U.S. Pat. No. 8,907,065, WO 2016/062722, WO 2009/101611, WO2010/027827, WO 2011/066342, WO 2007/005874, WO 2001/014556, US2011/0271358, WO 2010/036959, WO 2010/077634, U.S. Pat. No. 8,217,149, US 2012/0039906, WO 2012/145493, US 2011/0318373, U.S. Pat. No. 8,779,108, US 20140044738, WO 2009/089149, WO 2007/00587, WO 2016061142, WO 2016,02263, WO 2010/077634, and WO 2015/112900, the entire disclosures of which are hereby incorporated by reference.

### SIRP1α Targeting Moieties

[0396] In some embodiments, the targeting moiety binds a signal regulatory protein α-1 (SIRP1α). SIRP1α (also known as SIRPα) belongs to a family of cell immune receptors encompassing inhibitory (SIRPα), activating (SIRPβ), nonsignaling (SIRPγ) and soluble (SIRPδ) members. SIRP1α is expressed primarily on myeloid cells, including macrophages, granulocytes, myeloid dendritic cells (DCs), mast cells, and their precursors, including hematopoietic stem cells. SIRP1α acts as an inhibitory receptor that interacts with a broadly expressed transmembrane glycoprotein CD47 to regulate phagocytosis. In particular, the binding of SIRP1α on macrophages by CD47 expressed on target cells, generates an inhibitory signal that negatively regulates phagocytosis of the target cell.

[0397] In some embodiments, the SIRP1α targeting moiety specifically recognizes and binds SIRP1α on macrophages.

[0398] In some embodiments, the SIRP1α targeting moiety specifically recognizes and binds SIRP1α on monocytes.

[0399] In some embodiments, the SIRP1α targeting moiety specifically recognizes and binds SIRP1α on TAMs (Tumor Associated Macrophages).

[0400] In some embodiments, the SIRP1α targeting moiety specifically recognizes and binds SIRP1α on dendritic cells, including without limitation cDC2 and pDC

[0401] In some embodiments, the SIRP1α targeting moiety recognizes one or more linear epitopes present on SIRP1α. In some embodiments, a linear epitope refers to any continuous sequence of amino acids present on SIRP1α. In another embodiment, the recognition domain recognizes one or more conformational epitopes present on SIRP1α. As used herein, a conformation epitope refers to one or more sections of amino acids (which may be discontinuous) which form a three-dimensional surface with features and/or shapes and/or tertiary structures capable of being recognized by an antigen recognition domain.

[0402] In some embodiments, the SIRP1α targeting moiety binds to the full-length and/or mature forms and/or isoforms and/or splice variants and/or fragments and/or any other naturally occurring or synthetic analogs, variants, or mutants of SIRP1α. In an embodiment, the SIRP1α is human SIRP1α. In various embodiments, the SIRP1α targeting moiety may bind to any forms of the human SIRP1α, including monomeric, dimeric, heterodimeric, multimeric and associated forms. In an embodiment, the SIRP1α targeting moiety binds to the monomeric form of SIRP1α. In another embodiment, the SIRP1α targeting moiety binds to a dimeric form of SIRP1α.

[0403] In some embodiments, the SIRP1α targeting moiety comprises a recognition domain that recognizes one or more epitopes present on human SIRP1α. In an embodiment, the SIRP1α targeting moiety comprises a recognition domain that recognizes human SIRP1α with a signal peptide sequence. An exemplary human SIRP1α polypeptide with a signal peptide sequence is SEQ ID NO:1057.

[0404] In some embodiments, the SIRP1α targeting moiety comprises a recognition domain that recognizes human SIRP1α without a signal peptide sequence. An exemplary human SIRP1α polypeptide without a signal peptide sequence is SEQ ID NO: 1058.

[0405] In some embodiments, the SIRP1α targeting moiety comprises a recognition domain that recognizes a polypeptide encoding human SIRP1α isoform 2 (SEQ ID NO: 1059).

[0406] In some embodiment, the SIRP1α targeting moiety comprises a recognition domain that recognizes a polypeptide encoding human SIRP1α isoform 4 (SEQ ID NO:1060).

[0407] In some embodiments, the SIRP1α targeting moiety may be any protein-based agent capable of specific binding, such as an antibody or derivatives thereof.

[0408] In some embodiments, the SIRP1α targeting moiety comprises antibody derivatives or formats. In some embodiments, the SIRP1α targeting moiety comprises a single-domain antibody, a recombinant heavy-chain-only antibody (VHH), a single-chain antibody (scFv), a shark heavy-chain-only antibody (VNAR), a microprotein (cysteine knot protein, knottin), a DARPin; a Tetranectin; an Affibody; a Transbody; an Anticalin; an AdNectin; an alphabody; a bicyclic peptide; an Affilin; a Microbody; a peptide aptamer; an alterase; a plastic antibodies; a phylomer; a stradobody; a maxibody; an evibody; a fynomer, an armadillo repeat protein, a Kunitz domain, an avimer, an atrimer, a probody, an immunobody, a triomab, a troybody; a pepbody; a vaccibody, a UniBody; Affimers, a DuoBody, a Fv, a Fab, a Fab′, a F(ab′)₂, a peptide mimetic molecule, or a small (e.g. synthetic or natural) molecule, e.g. without limitation, as described in US Patent Nos. or Patent Publication Nos. U.S. Pat. No. 7,417,130, US 2004/132094, U.S. Pat. No. 5,831,012, US 2004/023334, U.S. Pat. Nos. 7,250,297, 6,818,418, US 2004/209243, U.S. Pat. Nos. 7,838,629, 7,186,524, 6,004,746, 5,475,096, US 2004/146938, US 2004/157209, U.S. Pat. Nos. 6,994,982, 6,794,144, US 2010/239633, U.S. Pat. No. 7,803,907, US 2010/119446, and/or U.S. Pat. No. 7,166,697, the contents of which are hereby incorporated by reference in their entireties. See also, Storz MAbs. 2011 May-June; 3(3): 310-317.

[0409] In some embodiments, the SIRP1α targeting moiety comprises a single-domain antibody, such as VHH from, for example, an organism that produces VHH antibody such as a camelid, a shark, or a designed VHH. VHHs are antibody-derived therapeutic proteins that contain the unique structural and functional properties of naturally-occurring heavy-chain antibodies. VHH technology is based on fully functional antibodies from camelids that lack light chains. These heavy-chain antibodies contain a single variable domain (VHH) and two constant domains (CH2 and CH3).

[0410] In some embodiments, the SIRP1α targeting moiety comprises a VHH. In some embodiments, the VHH is a humanized VHH or camelized VHH.

[0411] In some embodiments, the VHH comprises a fully human V_{H} domain, e.g. a HUMABODY (Crescendo Biologics, Cambridge, UK). In some embodiments, fully human V_{H} domain, e.g. a HUMABODY is monovalent, bivalent, or trivalent. In some embodiments, the fully human V_{H} domain, e.g. a HUMABODY is mono- or multi-specific such as monospecific, bispecific, or trispecific. Illustrative fully human V_{H} domains, e.g. HUMABODIES are described in, for example, WO 2016/113555 and WO2016/113557, the entire disclosure of which is incorporated by reference.

[0412] For example, in some embodiments, the SIRP1α targeting moiety comprises one or more antibodies, antibody derivatives or formats, peptides or polypeptides, VHHs, or fusion proteins that selectively bind SIRP1α. In some embodiments, the SIRP1α targeting moiety comprises an antibody or derivative thereof that specifically binds to SIRP1α. In some embodiments, the SIRP1α targeting moiety comprises a camelid heavy chain antibody (VHH) that specifically binds to SIRP1α.

[0413] In some embodiments, the SIRP1α targeting moiety is a VHH comprising a single amino acid chain having four “framework regions” or FRs and three “complementary determining regions” or CDRs. As used herein, “framework region” or “FR” refers to a region in the variable domain which is located between the CDRs. As used herein, “complementary determining region” or “CDR” refers to variable regions in VHHs that contains the amino acid sequences capable of specifically binding to antigenic targets. In various embodiments, the present Fc-based chimeric protein complex comprises a VHH having a variable domain comprising at least one CDR1, CDR2, and/or CDR3 sequences.

[0414] In some embodiments, the SIRP1α targeting moiety may comprise any combination of heavy chain, light chain, heavy chain variable region, light chain variable region, complementarity determining region (CDR), and framework region sequences that is known to recognize and bind to SIRP1α.

[0415] In some embodiments, the present technology contemplates the use of any natural or synthetic analogs, mutants, variants, alleles, homologs and orthologs (herein collectively referred to as “analogs”) of the SIRP1α targeting moieties described herein. In various embodiments, the amino acid sequence of the SIRP1α targeting moiety further includes an amino acid analog, an amino acid derivative, or other non-classical amino acids.

[0416] In some embodiments, the SIRP1α targeting moiety comprises a sequence that is at least 60% identical to any one of the SIRP1α sequences disclosed herein. For example, in some embodiments, the SIRP1α targeting moiety comprises a sequence that is at least about 60%, at least about 61%, at least about 62%, at least about 63%, at least about 64%, at least about 65%, at least about 66%, at least about 67%, at least about 68%, at least about 69%, at least about 70%, at least about 71%, at least about 72%, at least about 73%, at least about 74%, at least about 75%, at least about 76%, at least about 77%, at least about 78%, at least about 79%, at least about 80%, at least about 81%, at least about 82%, at least about 83%, at least about 84%, at least about 85%, at least about 86%, at least about 87%, at least about 88%, at least about 89%, at least about 90%, at least about 91%, at least about 92%, at least about 93%, at least about 94%, at least about 95%, at least about 96%, at least about 97%, at least about 98%, at least about 99%, or 100% identical to any of the SIRP1α sequences disclosed herein (e.g. about 60%, or about 61%, or about 62%, or about 63%, or about 64%, or about 65%, or about 66%, or about 67%, or about 68%, or about 69%, or about 70%, or about 71%, or about 72%, or about 73%, or about 74%, or about 75%, or about 76%, or about 77%, or about 78%, or about 79%, or about 80%, or about 81%, or about 82%, or about 83%, or about 84%, or about 85%, or about 86%, or about 87%, or about 88%, or about 89%, or about 90%, or about 91%, or about 92%, or about 93%, or about 94%, or about 95%, or about 96%, or about 97%, or about 98%, about 99% or about 100% sequence identity to any one of the SIRP1α sequences disclosed herein).

[0417] In some embodiments, the SIRP1α targeting moiety comprises an amino acid sequence having one or more amino acid mutations with respect to any targeting moiety sequence that is known to recognize and bind to SIRP1α. In various embodiments, the SIRP1α targeting moiety comprises an amino acid sequence having one, or two, or three, or four, or five, or six, or seen, or eight, or nine, or ten, or fifteen, twenty, thirty, forty, or fifty amino acid mutations with respect to any targeting moiety sequence that is known to recognize and bind to SIRP1α. In some embodiments, the one or more amino acid mutations may be independently selected from substitutions, insertions, deletions, and truncations.

[0418] In some embodiments, the amino acid mutations are amino acid substitutions, and may include conservative and/or non-conservative substitutions.

[0419] “Conservative substitutions” may be made, for instance, on the basis of similarity in polarity, charge, size, solubility, hydrophobicity, hydrophilicity, and/or the amphipathic nature of the amino acid residues involved. The 20 naturally occurring amino acids can be grouped into the following six standard amino acid groups: (1) hydrophobic: Met, Ala, Val, Leu, Ile; (2) neutral hydrophilic: Cys, Ser, Thr; Asn, Gln; (3) acidic: Asp, Glu; (4) basic: His, Lys, Arg; (5) residues that influence chain orientation: Gly, Pro; and (6) aromatic: Trp, Tyr, Phe.

[0420] As used herein, “conservative substitutions” are defined as exchanges of an amino acid by another amino acid listed within the same group of the six standard amino acid groups shown above. For example, the exchange of Asp by Glu retains one negative charge in the so modified polypeptide. In addition, glycine and proline may be substituted for one another based on their ability to disrupt α-helices.

[0421] As used herein, “non-conservative substitutions” are defined as exchanges of an amino acid by another amino acid listed in a different group of the six standard amino acid groups (1) to (6) shown above.

[0422] In various embodiments, the substitutions may also include non-classical amino acids. Exemplary non-classical amino acids include, but are not limited to, selenocysteine, pyrrolysine, N-formylmethionine β-alanine, GABA and δ-Aminolevulinic acid, 4-aminobenzoic acid (PABA), D-isomers of the common amino acids, 2,4-diaminobutyric acid, α-amino isobutyric acid, 4-aminobutyric acid, Abu, 2-amino butyric acid, γ-Abu, ε-Ahx, 6-amino hexanoic acid, Aib, 2-amino isobutyric acid, 3-amino propionic acid, ornithine, norleucine, norvaline, hydroxyproline, sarcosme, citrulline, homocitrulline, cysteic acid, t-butylglycine, t-butylalanine, phenylglycine, cyclohexylalanine, β-alanine, fluoro-amino acids, designer amino acids such as p methyl amino acids, C α-methyl amino acids, N α-methyl amino acids, and amino acid analogs in general.

[0423] In various embodiments, the amino acid mutation may be in the CDRs of the targeting moiety (e.g., the CDR1, CDR2 or CDR3 regions). In another embodiment, amino acid alteration may be in the framework regions (FRs) of the targeting moiety (e.g., the FR1, FR2, FR3, or FR4 regions).

[0424] Modification of the amino acid sequences may be achieved using any known technique in the art e.g., site-directed mutagenesis or PCR based mutagenesis. Such techniques are described, for example, in Sambrook et al., Molecular Cloning: A Laboratory Manual, Cold Spring Harbor Press, Plainview, N.Y., 1989 and Ausubel et al., Current Protocols in Molecular Biology, John Wiley & Sons, New York, N.Y., 1989.

[0425] In various embodiments, the mutations do not substantially reduce the SIRP1α targeting moiety's capability to specifically recognize and bind to SIRP1α. In various embodiments, the mutations do not substantially reduce the SIRP1α targeting moiety's ability to bind specifically to SIRP1α and without functionally modulating (e.g., partially or fully neutralizing) SIRP1α.

[0426] In various embodiments, the binding affinity of the SIRP1α targeting moiety for the full-length and/or mature forms and/or isoforms and/or splice variants and/or fragments and/or monomeric and/or dimeric forms and/or any other naturally occurring or synthetic analogs, variants, or mutants of SIRP1α may be described by the equilibrium dissociation constant (K_{D}). In various embodiments, the SIRP1α targeting moiety that binds to the full-length and/or mature forms and/or isoforms and/or splice variants and/or fragments and/or any other naturally occurring or synthetic analogs, variants, or mutants (including monomeric and/or dimeric forms) of SIRP1α with a K_{D} of less than about 1 uM, about 900 nM, about 800 nM, about 700 nM, about 600 nM, about 500 nM, about 400 nM, about 300 nM, about 200 nM, about 100 nM, about 90 nM, about 80 nM, about 70 nM, about 60 nM, about 50 nM, about 40 nM, about 30 nM, about 20 nM, about 10 nM, or about 5 nM, or about 1 nM.

[0427] In various embodiments, the SIRP1α targeting moiety binds but does not functionally modulate the antigen of interest, i.e., SIRP1α. For example, in some embodiments, the SIRP1α targeting moiety simply targets the antigen but does not substantially functionally modulate (e.g. substantially inhibit, reduce or neutralize) a biological effect that the antigen has. In various embodiments, the targeting moiety of the present Fc-based chimeric protein complex binds an epitope that is physically separate from an antigen site that is important for its biological activity (e.g. an antigen's active site).

[0428] In some embodiments, the SIRP1α targeting moiety binds but functionally modulates the antigen of interest, i.e., SIRP1α. For example, in some embodiments, the SIRP1α targeting moiety targets the antigen, i.e., SIRP1α, and functionally modulates (e.g. inhibit, reduce or neutralize) a biological effect that the antigen has. Such binding along with functional modulation may find use in various embodiments of the present invention including methods in which the present Fc-based chimeric protein complex is used to directly or indirectly recruit active immune cells to a site of need via an effector antigen.

[0429] In some embodiments, the SIRP1α targeting moiety may be used to directly or indirectly recruit macrophages via SIRP1α to a tumor cell in a method of reducing or eliminating a tumor (e.g. the present Fc-based chimeric protein complex may comprise a targeting moiety having an anti-SIRP1α antigen recognition domain and a targeting moiety having a recognition domain (e.g. antigen recognition domain) directed against a tumor antigen or receptor). Evidence indicates that tumor cells frequently upregulate CD47 which engages SIRP1α so as to evade phagocytosis. Accordingly, in various embodiments, it may be desirable to directly or indirectly recruit macrophages to tumor cells and functionally inhibit, reduce, or neutralize the inhibitory activity of SIRP1α thereby resulting in phagocytosis of the tumor cells by the macrophages. In various embodiments, the present Fc-based chimeric protein complex enhances phagocytosis of tumor cells or any other undesirable cells by macrophages.

[0430] SIRP alpha targeting moieties may comprise CDRs of antibodies as described in WO200140307A1, WO2013056352A1, WO2015138600A2, WO2017178653A2, WO2018057669A1, WO2018107058A1, WO2018190719A2, WO2019023347A1, the contents of which are hereby incorporated by reference in their entireties.

### FAP Targeting Moieties

[0431] Fibroblast activation protein (FAP) is a 170 kDa melanoma membrane-bound gelatinase that belongs to the serine protease family. FAP is selectively expressed in reactive stromal fibroblasts of epithelial cancers, granulation tissue of healing wounds, and malignant cells of bone and soft tissue sarcomas. FAP is believed to be involved in the control of fibroblast growth or epithelial-mesenchymal interactions during development, tissue repair, and epithelial carcinogenesis.

[0432] In some embodiments, the targeting moiety is a FAP targeting moiety that is a protein-based agent capable of specific binding to FAP. In some embodiments, the FAP targeting moiety is a protein-based agent capable of specific binding to FAP without functional modulation (e.g., partial or full neutralization) of FAP.

[0433] In some embodiments, the fibroblast targeting moiety targets F2 fibroblasts. In some embodiments, the fibroblast targeting moiety directly or indirectly alters the microenvironment of the F2 fibroblasts. In some embodiments, the fibroblast binding agent directly or indirectly polarizes the F2 fibroblast into F1 fibroblast.

[0434] F2 fibroblast(s) refers to pro-tumorigenic (or tumor promoting) cancer-associated fibroblasts (CAFs) (a/k/a Type II-CAF). F1 fibroblast(s) refers to tumor suppressive CAFs (a/k/a Type I-CAF). Polarization refers to changing the phenotype of cell, e.g. changing a tumorigenic F2 fibroblast to a tumor suppressive F1 fibroblast.

[0435] In some embodiments, the FAP targeting moiety targets a FAP marker.

[0436] In some embodiments, the FAP targeting moiety comprises a binding agent having an antigen recognition domain that recognizes an epitope present on FAP. In some embodiments, the antigen-recognition domain recognizes one or more linear epitopes present on FAP. In some embodiments, a linear epitope refers to any continuous sequence of amino acids present on FAP. In another embodiment, the antigen-recognition domain recognizes one or more conformational epitopes present on FAP. As used herein, a conformation epitope refers to one or more sections of amino acids (which may be discontinuous), which form a three-dimensional surface with features and/or shapes and/or tertiary structures capable of being recognized by an antigen recognition domain.

[0437] In some embodiments, the FAP targeting moiety can bind to the full-length and/or mature forms and/or isoforms and/or splice variants and/or fragments and/or any other naturally occurring or synthetic analogs, variants, or mutants of human FAP. In some embodiments, the FAP targeting moiety can bind to any forms of the human FAP, including monomeric, dimeric, heterodimeric, multimeric and associated forms. In an embodiment, the FAP targeting moiety binds to the monomeric form of FAP. In another embodiment, the FAP targeting moiety binds to a dimeric form of FAP. In a further embodiment, the FAP targeting moiety binds to glycosylated form of FAP, which may be either monomeric or dimeric.

[0438] In an embodiment, the FAP targeting moiety comprises an antigen recognition domain that recognizes one or more epitopes present on human FAP. In some embodiments, the human FAP comprises the amino acid sequence of SEQ ID NO: 1061.

[0439] In some embodiments, the FAP targeting moiety is capable of specific binding. In some embodiments, the FAP targeting moiety comprises an antigen recognition domain such as an antibody or derivatives thereof.

[0440] In some embodiments, the FAP targeting moiety comprises an antibody derivative or format. In some embodiments, the FAP targeting moiety comprises a single-domain antibody, a recombinant heavy-chain-only antibody (VHH), a single-chain antibody (scFv), a shark heavy-chain-only antibody (VNAR), a microprotein (cysteine knot protein, knottin), a DARPin; a Tetranectin; an Affibody; a Transbody; an Anticalin; an AdNectin; an alphabody; a bicyclic peptide; an Affilin; an Affimer, a Microbody; an aptamer; an alterase; a plastic antibody; a phylomer; a stradobody; a maxibody; an evibody; a fynomer, an armadillo repeat protein, a Kunitz domain, an avimer, an atrimer, a probody, an immunobody, a triomab, a troybody; a pepbody; a vaccibody, a UniBody; a DuoBody, a Fv, a Fab, a Fab′, a F(ab′)2, a peptide mimetic molecule, or a small (e.g. synthetic or natural) molecule, e.g. without limitation, as described in US Patent Nos. or Patent Publication Nos. U.S. Pat. No. 7,417,130, US 2004/132094, U.S. Pat. No. 5,831,012, US 2004/023334, U.S. Pat. Nos. 7,250,297, 6,818,418, US 2004/209243, U.S. Pat. Nos. 7,838,629, 7,186,524, 6,004,746, 5,475,096, US 2004/146938, US 2004/157209, U.S. Pat. Nos. 6,994,982, 6,794,144, US 2010/239633, U.S. Pat. No. 7,803,907, US 2010/119446, and/or U.S. Pat. No. 7,166,697, the contents of which are hereby incorporated by reference in their entireties. See also, Storz MAbs. 2011 May-June; 3(3): 310-317.

[0441] In some embodiments, the FAP targeting moiety comprises a single-domain antibody, such as a VHH. The VHH may be derived from, for example, an organism that produces VHH antibody such as a camelid, a shark, or the VHH may be a designed VHH. VHHs are antibody-derived therapeutic proteins that contain the unique structural and functional properties of naturally-occurring heavy-chain antibodies. VHH technology is based on fully functional antibodies from camelids that lack light chains. These heavy-chain antibodies contain a single variable domain (VHH) and two constant domains (CH2 and CH3).

[0442] In an embodiment, the FAP targeting moiety comprises a VHH. In some embodiments, the VHH is a humanized VHH or camelized VHH.

[0443] In some embodiments, the VHH comprises a fully human VH domain, e.g. a HUMABODY (Crescendo Biologics, Cambridge, UK). In some embodiments, fully human VH domain, e.g. a HUMABODY is monovalent, bivalent, or trivalent. In some embodiments, the fully human VH domain, e.g. a HUMABODY is mono- or multi-specific such as monospecific, bispecific, or trispecific. Illustrative fully human VH domains, e.g. HUMABODIES are described in, for example, WO 2016/113555 and WO 2016/113557, the entire disclosures of which are incorporated by reference.

[0444] By way of example, but not by way of limitation, in some embodiments, a human VHH FAP targeting moiety comprises an amino acid sequence selected from the following sequences: 2HFA44 (SEQ ID NO: 1062); 2HFA52 (SEQ ID NO: 1063); 2HFA11 (SEQ ID NO: 1064); 2HFA4 (SEQ ID NO: 1065); 2HFA46 (SEQ ID NO: 1066); 2HFA10 (SEQ ID NO: 1067); 2HFA38 (SEQ ID NO: 1068); 2HFA20 (SEQ ID NO: 1069); 2HFA5 (SEQ ID NO: 1070); 2HFA19 (SEQ ID NO: 1071); 2HFA2 (SEQ ID NO: 1072); 2HFA41 (SEQ ID NO: 1073); 2HFA42 (SEQ ID NO: 1074); 2HFA12 (SEQ ID NO: 1075); 2HFA24 (SEQ ID NO: 1076); 2HFA67 (SEQ ID NO: 1077); 2HFA29 (SEQ ID NO: 1078); 2HFA51 (SEQ ID NO: 1079); 2HFA63 (SEQ ID NO: 1080); 2HFA62 (SEQ ID NO: 1081); 2HFA26 (SEQ ID NO: 1082); 2HFA25 (SEQ ID NO: 1083); 2HFA1 (SEQ ID NO: 1084); 2HFA3 (SEQ ID NO: 1085); 2HFA7 (SEQ ID NO: 1086); 2HFA31 (SEQ ID NO: 1087); 2HFA6 (SEQ ID NO: 1088); 2HFA53 (SEQ ID NO: 1089); 2HFA9 (SEQ ID NO: 1090); 2HFA73 (SEQ ID NO: 1091); 2HFA55 (SEQ ID NO: 1092); 2HFA71 (SEQ ID NO: 1093); 2HFA60 (SEQ ID NO: 1094); 2HFA65 (SEQ ID NO: 1095); 2HFA49 (SEQ ID NO: 1096); 2HFA57 (SEQ ID NO: 1097); 2HFA23 (SEQ ID NO: 1098); 2HFA36 (SEQ ID NO: 1099); 2HFA14 (SEQ ID NO: 1100); 2HFA43 (SEQ ID NO: 1101); and 2HFA50 (SEQ ID NO: 1102).

[0445] In some embodiments, the FAP targeting moiety comprises an amino acid sequence selected from SEQ ID NOs: 1062-1102 (provided above) without the terminal histidine tag sequence (i.e., HHHHHH; SEQ ID NO: 393).

[0446] In some embodiments, the FAP targeting moiety comprises an amino acid sequence selected from SEQ ID NOs: 1062-1102 (provided above) without the HA tag (i.e., YPYDVPDYGS; SEQ ID NO: 394).

[0447] In some embodiments, the FAP targeting moiety comprises an amino acid sequence selected from SEQ ID NOs: 1062-1102 (provided above) without the AAA linker (i.e., AAA).

[0448] In some embodiments, the FAP targeting moiety comprises an amino acid sequence selected from SEQ ID NOs: 1062-1102 (provided above) without the AAA linker, HA tag, and terminal histidine tag sequence (i.e., AAAYPYDVPDYGSHHHHHH; SEQ ID NO: 395).

[0449] By way of example, but not by way of limitation, in some embodiments, a human VHH FAP targeting moiety comprises an amino acid sequence selected from the following sequences: 2HFA44 (SEQ ID NO: 1103); 2HFA52 (SEQ ID NO: 1104); 2HFA11 (SEQ ID NO: 1105); 2HFA4 (SEQ ID NO: 1106); 2HFA46 (SEQ ID NO: 1107); 2HFA10 (SEQ ID NO: 1108); 2HFA38 (SEQ ID NO: 1109); 2HFA20 (SEQ ID NO: 1110); 2HFA5 (SEQ ID NO: 1111); 2HFA19 (SEQ ID NO: 1112); 2HFA2 (SEQ ID NO: 1113); 2HFA41 (SEQ ID NO: 1114); 2HFA42 (SEQ ID NO: 1115); 2HFA12 (SEQ ID NO: 1116); 2HFA24 (SEQ ID NO: 1117); 2HFA67 (SEQ ID NO: 1118); 2HFA29 (SEQ ID NO: 1119); 2HFA51 (SEQ ID NO: 1120); 2HFA63 (SEQ ID NO: 1121); 2HFA62 (SEQ ID NO: 1122); 2HFA26 (SEQ ID NO: 1123); 2HFA25 (SEQ ID NO: 1124); 2HFA1 (SEQ ID NO: 1125); 2HFA3 (SEQ ID NO: 1126); 2HFA7 (SEQ ID NO: 1127); 2HFA31 (SEQ ID NO: 1128); 2HFA6 (SEQ ID NO: 1129); 2HFA53 (SEQ ID NO: 1130); 2HFA9 (SEQ ID NO: 1131); 2HFA73 (SEQ ID NO: 1132); 2HFA55 (SEQ ID NO: 1133); 2HFA71 (SEQ ID NO: 1134); 2HFA60 (SEQ ID NO: 1135); 2HFA65 (SEQ ID NO: 1136); 2HFA49 (SEQ ID NO: 1137); 2HFA57 (SEQ ID NO: 1138); 2HFA23 (SEQ ID NO: 1139); 2HFA36 (SEQ ID NO: 1140); 2HFA14 (SEQ ID NO: 1141); 2HFA43 (SEQ ID NO: 1142); and 2HFA50 (SEQ ID NO: 1143).

[0450] In some embodiments, the FAP targeting moiety comprises a binding agent that is a VHH comprising a single amino acid chain having four “framework regions” or FRs and three “complementary determining regions” or CDRs. As used herein, “framework region” or “FR” refers to a region in the variable domain which is located between the CDRs. As used herein, “complementary determining region” or “CDR” refers to variable regions in VHHs that contains the amino acid sequences capable of specifically binding to antigenic targets.

[0451] In some embodiments, the FAP targeting moiety comprises a VHH having a variable domain comprising at least one CDR1, CDR2, and/or CDR3 sequences. In some embodiments, the FAP targeting moiety comprises a VHH having a variable region comprising at least one FR1, FR2, FR3, and FR4 sequences.

[0452] In some embodiments, a human FAP targeting moiety comprises a CDR1 sequence selected from SEQ ID Nos.: 1144-1172. In some embodiments, a human FAP targeting moiety comprises a CDR2 sequence selected from SEQ ID Nos.: 1173-1201. In some embodiments, a human FAP targeting moiety comprises a CDR3 sequence selected from SEQ ID Nos.: 1202-1232.

[0453] In some embodiments, the FAP targeting moiety has at least 90% identity with any FAP amino acid sequence selected disclosed herein. In some embodiments, the FAP targeting moiety has about 90%, about 91%, about 92%, about 93%, about 94%, about 95%, about 96%, about 97%, about 98%, about 99% identity with any FAP amino acid sequence selected disclosed herein.

[0454] In various illustrative embodiments, the murine FAP targeting moiety has at least 90% identity with the amino acid sequence of sibrotuzumab.

[0455] In some embodiments, the present technology contemplates the use of any natural or synthetic analogs, mutants, variants, alleles, homologs and orthologs (herein collectively referred to as “analogs”) of the FAP targeting moieties as described herein. In some embodiments, the amino acid sequence of the FAP targeting moiety further includes an amino acid analog, an amino acid derivative, or other non-classical amino acids.

[0456] In some embodiments, the FAP targeting moiety comprises a sequence that is at least 60% identical to any one of the FAP sequences disclosed herein. For example, the FAP targeting moiety may comprise a sequence that is at least about 60%, at least about 61%, at least about 62%, at least about 63%, at least about 64%, at least about 65%, at least about 66%, at least about 67%, at least about 68%, at least about 69%, at least about 70%, at least about 71%, at least about 72%, at least about 73%, at least about 74%, at least about 75%, at least about 76%, at least about 77%, at least about 78%, at least about 79%, at least about 80%, at least about 81%, at least about 82%, at least about 83%, at least about 84%, at least about 85%, at least about 86%, at least about 87%, at least about 88%, at least about 89%, at least about 90%, at least about 91%, at least about 92%, at least about 93%, at least about 94%, at least about 95%, at least about 96%, at least about 97%, at least about 98%, at least about 99%, or 100% identical to any of the FAP sequences disclosed herein (e.g. about 60%, or about 61%, or about 62%, or about 63%, or about 64%, or about 65%, or about 66%, or about 67%, or about 68%, or about 69%, or about 70%, or about 71%, or about 72%, or about 73%, or about 74%, or about 75%, or about 76%, or about 77%, or about 78%, or about 79%, or about 80%, or about 81%, or about 82%, or about 83%, or about 84%, or about 85%, or about 86%, or about 87%, or about 88%, or about 89%, or about 90%, or about 91%, or about 92%, or about 93%, or about 94%, or about 95%, or about 96%, or about 97%, or about 98%, about 99% or about 100% sequence identity to any one of the FAP sequences disclosed herein).

[0457] In some embodiments, the FAP targeting moiety comprises an amino acid sequence having one or more amino acid mutations with respect to any one of the sequences disclosed herein. In some embodiments, the FAP targeting moiety comprises an amino acid sequence having one, or two, or three, or four, or five, or six, or seen, or eight, or nine, or ten, or fifteen, or twenty amino acid mutations with respect to any one of the sequences disclosed herein. In some embodiments, the one or more amino acid mutations may be independently selected from substitutions, insertions, deletions, and truncations.

[0458] In some embodiments, the amino acid mutations are amino acid substitutions, and may include conservative and/or non-conservative substitutions.

[0459] “Conservative substitutions” may be made, for instance, on the basis of similarity in polarity, charge, size, solubility, hydrophobicity, hydrophilicity, and/or the amphipathic nature of the amino acid residues involved. The 20 naturally occurring amino acids can be grouped into the following six standard amino acid groups: (1) hydrophobic: Met, Ala, Val, Leu, Ile; (2) neutral hydrophilic: Cys, Ser, Thr; Asn, Gln; (3) acidic: Asp, Glu; (4) basic: His, Lys, Arg; (5) residues that influence chain orientation: Gly, Pro; and (6) aromatic: Trp, Tyr, Phe.

[0460] As used herein, “conservative substitutions” are defined as exchanges of an amino acid by another amino acid listed within the same group of the six standard amino acid groups shown above. For example, the exchange of Asp by Glu retains one negative charge in the so modified polypeptide. In addition, glycine and proline may be substituted for one another based on their ability to disrupt α-helices.

[0461] As used herein, “non-conservative substitutions” are defined as exchanges of an amino acid by another amino acid listed in a different group of the six standard amino acid groups (1) to (6) shown above.

[0462] In some embodiments, the substitutions include non-classical amino acids. Illustrative non-classical amino acids include, but are not limited to, selenocysteine, pyrrolysine, N-formylmethionine β-alanine, GABA and 6-Aminolevulinic acid, 4-aminobenzoic acid (PABA), D-isomers of the common amino acids, 2,4-diaminobutyric acid, α-amino isobutyric acid, 4-aminobutyric acid, Abu, 2-amino butyric acid, γ-Abu, ε-Ahx, 6-amino hexanoic acid, Aib, 2-amino isobutyric acid, 3-amino propionic acid, ornithine, norleucine, norvaline, hydroxyproline, sarcosme, citrulline, homocitrulline, cysteic acid, t-butylglycine, t-butylalanine, phenylglycine, cyclohexylalanine, β-alanine, fluoro-amino acids, designer amino acids such as p methyl amino acids, C α-methyl amino acids, N α-methyl amino acids, and amino acid analogs in general.

[0463] In some embodiments, one or more amino acid mutations are in the CDRs of the FAP targeting moiety (e.g., the CDR1, CDR2 or CDR3 regions). In another embodiment, one or more amino acid mutations are in the framework regions (FRs) of the targeting moiety (e.g., the FR1, FR2, FR3, or FR4 regions).

[0464] Modification of the amino acid sequences may be achieved using any known technique in the art e.g., site-directed mutagenesis or PCR based mutagenesis. Such techniques are described, for example, in Sambrook et al., Molecular Cloning: A Laboratory Manual, Cold Spring Harbor Press, Plainview, N.Y., 1989 and Ausubel et al., Current Protocols in Molecular Biology, John Wiley & Sons, New York, N.Y., 1989.

[0465] In some embodiments, the mutations do not substantially reduce the FAP targeting moiety's capability to specifically bind to FAP. In some embodiments, the mutations do not substantially reduce the present FAP targeting moiety's capability to specifically bind to FAP and without functionally modulating (e.g., partially or fully neutralizing) FAP.

[0466] In some embodiments, the binding affinity of the FAP targeting moiety for the full-length and/or mature forms and/or isoforms and/or splice variants and/or fragments and/or monomeric and/or dimeric forms and/or any other naturally occurring or synthetic analogs, variants, or mutants (including monomeric and/or dimeric forms) of human FAP may be described by the equilibrium dissociation constant (K_{D}). In some embodiments, the FAP targeting moiety binds to the full-length and/or mature forms and/or isoforms and/or splice variants and/or fragments and/or any other naturally occurring or synthetic analogs, variants, or mutants (including monomeric and/or dimeric forms) of human FAP with a K_{D} of less than about 1 μM, about 900 nM, about 800 nM, about 700 nM, about 600 nM, about 500 nM, about 400 nM, about 300 nM, about 200 nM, about 100 nM, about 90 nM, about 80 nM, about 70 nM, about 60 nM, about 50 nM, about 40 nM, about 30 nM, about 20 nM, about 10 nM, or about 5 nM, or about 1 nM.

[0467] In some embodiments, the FAP targeting moiety binds but does not functionally modulate (e.g., partially or fully neutralize) the antigen of interest, i.e., FAP. For instance, in some embodiments, the FAP targeting moiety simply targets the antigen but does not substantially functionally modulate (e.g. partially or fully inhibit, reduce or neutralize) a biological effect that the antigen has. In some embodiments, the FAP targeting moiety binds an epitope that is physically separate from an antigen site that is important for its biological activity (e.g. an antigen's active site).

[0468] Such binding without significant function modulation finds use in some embodiments of the present technology, including methods in which the FAP targeting moiety is used to directly or indirectly recruit active immune cells to a site of need via an effector antigen. For example, in some embodiments, the FAP targeting moiety can be used to directly or indirectly recruit dendritic cells via FAP to a tumor cell in a method of reducing or eliminating a tumor (e.g. the FAP targeting moiety may comprise a binding agent having an anti-FAP antigen recognition domain and a targeting moiety having a recognition domain (e.g. antigen recognition domain) directed against a tumor antigen or receptor). In such embodiments, it is desirable to directly or indirectly recruit dendritic cells but not to functionally modulate or neutralize the FAP activity. In these embodiments, FAP signaling is an important piece of the tumor reducing or eliminating effect.

[0469] In some embodiments, the FAP targeting moiety enhances antigen-presentation by dendritic cells. For example, in some embodiments, the FAP targeting moiety directly or indirectly recruits dendritic cells via FAP to a tumor cell, where tumor antigens are subsequently endocytosed and presented on the dendritic cell for induction of potent humoral and cytotoxic T cell responses.

[0470] In other embodiments (for example, related to treating cancer, autoimmune, or neurodegenerative disease), the FAP targeting moiety comprises a binding agent that binds and neutralizes the antigen of interest, i.e., FAP. For instance, in some embodiments, the present methods may inhibit or reduce FAP signaling or expression, e.g. to cause a reduction in an immune response.

### XCR1 Targeting Moieties

[0471] In some embodiments, the targeting moiety is an XCR1 targeting moiety that is capable of specific binding to XCR1. In various embodiments, the XCR1 targeting moiety is a protein-based agent capable of specific binding to XCR1 without functional modulation (e.g., partial or full neutralization) of XCR1. XCR1 is a chemokine receptor belonging to the G protein-coupled receptor superfamily. The family members are characterized by the presence of 7 transmembrane domains and numerous conserved amino acids. XCR1 is most closely related to RBS11 and the MIP1-alpha/RANTES receptor. XCR1 transduces a signal by increasing the intracellular calcium ions level. XCR1 is the receptor for XCL1 and XCL2 (or lymphotactin-1 and -2).

[0472] In some embodiments, the targeting moiety of the present invention is XCL1 or XCL2 wherein the targeting moiety can be monomeric or multimeric. XCL1 or XCL2 is an NK cell/CD8+ T cell product that chemoattracts neutrophils. It exists as both a monomer and homodimer, with the monomer serving as a ligand for XCR1 and the dimer as a “ligand” for HSPG.

[0473] In some embodiments, the Fc-based chimeric proteins of the present invention include a first Fc chain that includes a first monomer of XCL1 or XCL2 and a second Fc chain that includes a second monomer of XCL1 or XCL2 wherein upon association of the Fc chains, the XCL1 or XCL2 monomers reconstitute to form a functional XCL1 or XCL2.

[0474] In some embodiments, the XCR1 targeting moiety comprises an antigen recognition domain that recognizes an epitope present on XCR1. In some embodiments, the antigen-recognition domain recognizes one or more linear epitopes present on XCR1. In some embodiment, a linear epitope refers to any continuous sequence of amino acids present on XCR1. In another embodiment, the antigen-recognition domain recognizes one or more conformational epitopes present on XCR1. As used herein, a conformation epitope refers to one or more sections of amino acids (which may be discontinuous) which form a three-dimensional surface with features and/or shapes and/or tertiary structures capable of being recognized by an antigen recognition domain.

[0475] In some embodiments, the XCR1 targeting moiety can bind to the full-length and/or mature forms and/or isoforms and/or splice variants and/or fragments and/or any other naturally occurring or synthetic analogs, variants, or mutants of human XCR1. In various embodiments, the XCR1 targeting moiety can bind to any forms of the human XCR1, including monomeric, dimeric, heterodimeric, multimeric and associated forms. In an embodiment, the Fc-based chimeric protein complex binds to the monomeric form of XCR1. In another embodiment, the XCR1 targeting moiety binds to a dimeric form of XCR1. In a further embodiment, the XCR1 targeting moiety binds to glycosylated form of XCR1, which may be either monomeric or dimeric.

[0476] In an embodiment, the XCR1 targeting moiety comprises an antigen recognition domain that recognizes one or more epitopes present on human XCR1. In an embodiment, the human XCR1 comprises the amino acid sequence of SEQ ID NO: 1233.

[0477] In various embodiments, the XCR1 targeting moiety is capable of specific binding. In various embodiments, the XCR1 targeting moiety comprises an antigen recognition domain such as an antibody or derivatives thereof.

[0478] In some embodiments, the XCR1 targeting moiety comprises an antibody derivative or format. In some embodiments, the XCR1 targeting moiety comprises a single-domain antibody, a recombinant heavy-chain-only antibody (VHH), a single-chain antibody (scFv), a shark heavy-chain-only antibody (VNAR), a microprotein (cysteine knot protein, knottin), a DARPin; a Tetranectin; an Affibody; an Affimer, a Transbody; an Anticalin; an AdNectin; an alphabody; a bicyclic peptide; an Affilin; a Microbody; a peptide aptamer; an alterase; a plastic antibody; a phylomer; a stradobody; a maxibody; an evibody; a fynomer, an armadillo repeat protein, a Kunitz domain, an avimer, an atrimer, a probody, an immunobody, a triomab, a troybody; a pepbody; a vaccibody, a UniBody; a DuoBody, a Fv, a Fab, a Fab′, a F(ab′)₂, a peptide mimetic molecule, or a small (e.g. synthetic or natural) molecule, e.g. without limitation, as described in US Patent Nos. or Patent Publication Nos. U.S. Pat. No. 7,417,130, US 2004/132094, U.S. Pat. No. 5,831,012, US 2004/023334, U.S. Pat. Nos. 7,250,297, 6,818,418, US 2004/209243, U.S. Pat. Nos. 7,838,629, 7,186,524, 6,004,746, 5,475,096, US 2004/146938, US 2004/157209, U.S. Pat. Nos. 6,994,982, 6,794,144, US 2010/239633, U.S. Pat. No. 7,803,907, US 2010/119446, and/or U.S. Pat. No. 7,166,697, the contents of which are hereby incorporated by reference in their entireties. See also, Storz MAbs. 2011 May-June; 3(3): 310-317.

[0479] In some embodiments, the XCR1 targeting moiety comprises a single-domain antibody, such as a VHH. The VHH may be derived from, for example, an organism that produces VHH antibody such as a camelid, a shark, or the VHH may be a designed VHH. VHHs are antibody-derived therapeutic proteins that contain the unique structural and functional properties of naturally-occurring heavy-chain antibodies. VHH technology is based on fully functional antibodies from camelids that lack light chains. These heavy-chain antibodies contain a single variable domain (V_{H}H) and two constant domains (CH2 and CH3). In an embodiment, the Fc-based chimeric protein complex comprises a VHH.

[0480] In some embodiments, the XCR1 targeting moiety comprises a VHH comprising a single amino acid chain having four “framework regions” or FRs and three “complementary determining regions” or CDRs. As used herein, “framework region” or “FR” refers to a region in the variable domain which is located between the CDRs. As used herein, “complementary determining region” or “CDR” refers to variable regions in VHHs that contains the amino acid sequences capable of specifically binding to antigenic targets.

[0481] In some embodiments, the XCR1 targeting moiety comprises a VHH having a variable domain comprising at least one CDR1, CDR2, and/or CDR3 sequences. In various embodiments, the XCR1 targeting moiety comprises a VHH having a variable region comprising at least one FR1, FR2, FR3, and FR4 sequences.

[0482] In some embodiments, the present invention contemplates the use of any natural or synthetic analogs, mutants, variants, alleles, homologs and orthologs (herein collectively referred to as “analogs”) of the XCR1 targeting moieties described herein. In various embodiments, the amino acid sequence of the XCR1 targeting moiety further includes an amino acid analog, an amino acid derivative, or other non-classical amino acids.

[0483] In some embodiments, the XCR1 targeting moiety comprises a sequence that is at least 60% identical to any one of the XCR1sequences disclosed herein. For example, the XCR1 targeting moiety may comprise a sequence that is at least about 60%, at least about 61%, at least about 62%, at least about 63%, at least about 64%, at least about 65%, at least about 66%, at least about 67%, at least about 68%, at least about 69%, at least about 70%, at least about 71%, at least about 72%, at least about 73%, at least about 74%, at least about 75%, at least about 76%, at least about 77%, at least about 78%, at least about 79%, at least about 80%, at least about 81%, at least about 82%, at least about 83%, at least about 84%, at least about 85%, at least about 86%, at least about 87%, at least about 88%, at least about 89%, at least about 90%, at least about 91%, at least about 92%, at least about 93%, at least about 94%, at least about 95%, at least about 96%, at least about 97%, at least about 98%, at least about 99%, or 100% identical to any of the XCR1 sequences disclosed herein (e.g. about 60%, or about 61%, or about 62%, or about 63%, or about 64%, or about 65%, or about 66%, or about 67%, or about 68%, or about 69%, or about 70%, or about 71%, or about 72%, or about 73%, or about 74%, or about 75%, or about 76%, or about 77%, or about 78%, or about 79%, or about 80%, or about 81%, or about 82%, or about 83%, or about 84%, or about 85%, or about 86%, or about 87%, or about 88%, or about 89%, or about 90%, or about 91%, or about 92%, or about 93%, or about 94%, or about 95%, or about 96%, or about 97%, or about 98%, about 99% or about 100% sequence identity to any one of the XCR1 sequences disclosed herein).

[0484] In some embodiments, the XCR1 targeting moiety comprises an amino acid sequence having one or more amino acid mutations with respect to any one of the sequences disclosed herein. In various embodiments, the XCR1 targeting moiety comprises an amino acid sequence having one, or two, or three, or four, or five, or six, or seen, or eight, or nine, or ten, or fifteen, or twenty amino acid mutations with respect to any one of the sequences disclosed herein. In some embodiments, the one or more amino acid mutations may be independently selected from substitutions, insertions, deletions, and truncations.

[0485] In some embodiments, the amino acid mutations are amino acid substitutions, and may include conservative and/or non-conservative substitutions.

[0486] “Conservative substitutions” may be made, for instance, on the basis of similarity in polarity, charge, size, solubility, hydrophobicity, hydrophilicity, and/or the amphipathic nature of the amino acid residues involved. The 20 naturally occurring amino acids can be grouped into the following six standard amino acid groups: (1) hydrophobic: Met, Ala, Val, Leu, Ile; (2) neutral hydrophilic: Cys, Ser, Thr; Asn, Gln; (3) acidic: Asp, Glu; (4) basic: His, Lys, Arg; (5) residues that influence chain orientation: Gly, Pro; and (6) aromatic: Trp, Tyr, Phe.

[0487] As used herein, “conservative substitutions” are defined as exchanges of an amino acid by another amino acid listed within the same group of the six standard amino acid groups shown above. For example, the exchange of Asp by Glu retains one negative charge in the so modified polypeptide. In addition, glycine and proline may be substituted for one another based on their ability to disrupt α-helices.

[0488] As used herein, “non-conservative substitutions” are defined as exchanges of an amino acid by another amino acid listed in a different group of the six standard amino acid groups (1) to (6) shown above.

[0489] In various embodiments, the substitutions may also include non-classical amino acids. Exemplary non-classical amino acids include, but are not limited to, selenocysteine, pyrrolysine, N-formylmethionine β-alanine, GABA and 6-Aminolevulinic acid, 4-aminobenzoic acid (PABA), D-isomers of the common amino acids, 2,4-diaminobutyric acid, α-amino isobutyric acid, 4-aminobutyric acid, Abu, 2-amino butyric acid, γ-Abu, ε-Ahx, 6-amino hexanoic acid, Aib, 2-amino isobutyric acid, 3-amino propionic acid, ornithine, norleucine, norvaline, hydroxyproline, sarcosme, citrulline, homocitrulline, cysteic acid, t-butylglycine, t-butylalanine, phenylglycine, cyclohexylalanine, β-alanine, fluoro-amino acids, designer amino acids such as p methyl amino acids, C α-methyl amino acids, N α-methyl amino acids, and amino acid analogs in general.

[0490] In various embodiments, the amino acid mutation may be in the CDRs of the targeting moiety (e.g., the CDR1, CDR2 or CDR3 regions). In another embodiment, amino acid alteration may be in the framework regions (FRs) of the targeting moiety (e.g., the FR1, FR2, FR3, or FR4 regions).

[0491] Modification of the amino acid sequences may be achieved using any known technique in the art e.g., site-directed mutagenesis or PCR based mutagenesis. Such techniques are described, for example, in Sambrook et al., Molecular Cloning: A Laboratory Manual, Cold Spring Harbor Press, Plainview, N.Y., 1989 and Ausubel et al., Current Protocols in Molecular Biology, John Wiley & Sons, New York, N.Y., 1989.

[0492] In various embodiments, the mutations do not substantially reduce the XCR1 targeting moiety's capability to specifically bind to XCR1. In various embodiments, the mutations do not substantially reduce the XCR1 targeting moiety's capability to specifically bind to XCR1 and without functionally modulating (e.g., partially or fully neutralizing) XCR1.

[0493] In various embodiments, the binding affinity of the XCR1 targeting moiety for the full-length and/or mature forms and/or isoforms and/or splice variants and/or fragments and/or monomeric and/or dimeric forms and/or any other naturally occurring or synthetic analogs, variants, or mutants (including monomeric and/or dimeric forms) of human XCR1 may be described by the equilibrium dissociation constant (K_{D}). In various embodiments, the Fc-based chimeric protein complex comprises a targeting moiety that binds to the full-length and/or mature forms and/or isoforms and/or splice variants and/or fragments and/or any other naturally occurring or synthetic analogs, variants, or mutants (including monomeric and/or dimeric forms) of human XCR1 with a K_{D} of less than about 1 uM, about 900 nM, about 800 nM, about 700 nM, about 600 nM, about 500 nM, about 400 nM, about 300 nM, about 200 nM, about 100 nM, about 90 nM, about 80 nM, about 70 nM, about 60 nM, about 50 nM, about 40 nM, about 30 nM, about 20 nM, about 10 nM, or about 5 nM, or about 1 nM.

[0494] In various embodiments, the XCR1 targeting moiety binds but does not functionally modulate (e.g., partially or fully neutralize) the antigen of interest, i.e., XCR1. For instance, in various embodiments, the XCR1 targeting moiety simply targets the antigen but does not substantially functionally modulate (e.g. partially or fully inhibit, reduce or neutralize) a biological effect that the antigen has. In various embodiments, the XCR1 targeting moiety binds an epitope that is physically separate from an antigen site that is important for its biological activity (e.g. an antigen's active site).

[0495] Such binding without significant function modulation finds use in various embodiments of the present invention, including methods in which the XCR1 targeting moiety is used to directly or indirectly recruit active immune cells to a site of need via an effector antigen. For example, in various embodiments, the XCR1 targeting moiety can be used to directly or indirectly recruit dendritic cells via XCR1 to a tumor cell in a method of reducing or eliminating a tumor (e.g. the XCR1 targeting moiety can comprise a binding agent having an anti-XCR1 antigen recognition domain and a targeting moiety having a recognition domain (e.g. antigen recognition domain) directed against a tumor antigen or receptor). In such embodiments, it is desirable to directly or indirectly recruit dendritic cells but not to functionally modulate or neutralize the XCR1 activity. In these embodiments, XCR1 signaling is an important piece of the tumor reducing or eliminating effect.

[0496] In some embodiments, the XCR1 targeting moiety enhances antigen-presentation by dendritic cells. For example, in various embodiments, the XCR1 targeting moiety directly or indirectly recruits dendritic cells via XCR1 to a tumor cell, where tumor antigens are subsequently endocytosed and presented on the dendritic cell for induction of potent humoral and cytotoxic T cell responses.

[0497] In other embodiments (for example, related to treating autoimmune or neurodegenerative disease), the XCR1 targeting moiety comprises a binding agent that binds and neutralizes the antigen of interest, i.e., XCR1. For instance, in various embodiments, the present methods may inhibit or reduce XCR1 signaling or expression, e.g. to cause a reduction in an immune response.

### FLT3 Targeting Moities

[0498] In some embodiments, the targeting moiety of the present invention targets FMS-like tyrosine kinase 3 (FLT3). FMS-like tyrosine kinase 3 (FLT3) is expressed on the surface of many hematopoietic progenitor cells. Signaling of FLT3 is important for the normal development of hematopoietic stem cells and progenitor cells. The FLT3 gene is one of the most frequently mutated genes in acute myeloid leukemia (AML). Further, FMS-like tyrosine kinase 3 ligand (FLT3L) agents find use in priming the immune system, e.g., altering the number of dendritic cells.

[0499] In some embodiments, the present invention relates to an Fc-based chimeric protein complex comprising a targeting moiety that comprises a recognition domain which specifically binds to antigen or receptor of interest, such as FMS-like tyrosine kinase 3 (FLT3).

[0500] In some embodiments, the targeting moiety comprises FLT3L or a portion thereof. In other embodiments, the targeting moiety comprises the extracellular domain of FLT3L, or a portion thereof.

[0501] In some embodiments, the Fc-based chimeric proteins of the present invention include a first Fc chain that includes a first monomer of FLT3L and a second Fc chain that includes a second monomer of FLT3L wherein upon association of the Fc chains, the FLT3L monomers reconstitute to form a functional FLT3L.

[0502] In some embodiments, the targeting moiety comprises an amino acid sequence having at least 90% identity with SEQ ID NO: 1571, or an amino acid sequence having at least 95% identity with SEQ ID NO: 1572.

SEQ ID NO: 1571 is the Flt3L full length (Bold =
leader sequence, Underlined: extracellular region
not part of receptor binding domain, Italic =
transmembrane and intracellular domain)
MTVLAPAWSPTTYLLLLLLLSSGLSGTQDCSFQHSPISSDFAVKIRELSD
YLLQDYPVTVASNLQDEELCGGLWRLVLAQRWMERLKTVAGSKMQGLLER
VNTEIHFVTKCAFQPPPSCLRFVQTNISRLLQETSEQLVALKPWITRQNF
SRCLELQCQPDSSTLPPPWSPRPLEATAPTAPQPPLLLLLLLPVGLLLLA
AAWCLHWQRTRRRTPRPGEQVPPVPSPQDLLLVEH

[0503] In some embodiments, the targeting moiety comprises an amino acid sequence having at least 90% identity with any one of SEQ ID NOs: 1572-1575, or an amino acid sequence having at least 95% identity with any one of SEQ ID NOs: 1572-1575.

SEQ ID NO: 1572 mature Flt3L-ec
(extracellular domain)
TQDCSFQHSPISSDFAVKIRELSDYLLQDYPVTVASNLQDEELCGGLWRL
VLAQRWMERLKTVAGSKMQGLLERVNTEIHFVTKCAFQPPPSCLRFVQTN
ISRLLQETSEQLVALKPWITRQNFSRCLELQCQPDSSTLPPPWSPRPLEA
TAPTAPQPP
SEQ ID NO: 1573 is mature Flt3L-ec
(extracellular domain) function shorter variant
commercial source (Prospecbio)
TQDCSFQHSPISSDFAVKIRELSDYLLQDYPVTVASNLQDEELCGGLWRL
VLAQRWMERLKTVAGSKMQGLLERVNTEIHFVTKCAFQPPPSCLRFVQTN
ISRLLQETSEQLVALKPWITRQNFSRCLELQCQPDSSTLPPPWSPRPLEA
TAPTA
SEQ ID NO: 1574 is mature Flt3L-ec (extracellular
domain) minimal functional domain (Savvides et
al., 2000, Nature Structural Biology)
TQDCSFQHSPISSDFAVKIRELSDYLLQDYPVTVASNLQDEELCGGLWRL
VLAQRWMERLKTVAGSKMQGLLERVNTEIHFVTKCAFQPPPSCLRFVQTN
ISRLLQETSEQLVALKPWITRQNFSRCLELQCQP
SEQ ID NO: 1575 is the mature Flt3L-ec
(extracellular domain) minimal functional domain
(Savvides et al., 2000, Nature Structural Biology)
shortened by starting at the first cysteine and
ending at the last cysteine
CSFQHSPISSDFAVKIRELSDYLLQDYPVTVASNLQDEELCGGLWRLVLA
QRWMERLKTVAGSKMQGLLERVNTEIHFVTKCAFQPPPSCLRFVQTNISR
LLQETSEQLVALKPWITRQNFSRCLELQC

### Non-Cellular Structure Targeting Moieties

[0504] In some embodiments, the targeting moiety's target (e.g. antigen or receptor) is part of a non-cellular structure. In some embodiments, the antigen or receptor is not an integral component of an intact cell or cellular structure. In some embodiments, the antigen or receptor is an extracellular antigen or receptor. In some embodiments, the target is a non-proteinaceous, non-cellular marker, including, without limitation, nucleic acids, inclusive of DNA or RNA, such as, for example, DNA released from necrotic tumor cells or extracellular deposits such as cholesterol.

[0505] In some embodiments, the target of interest (e.g. antigen, receptor) is part of the non-cellular component of the stroma or the extracellular matrix (ECM) or the markers associated therewith. As used herein, stroma refers to the connective and supportive framework of a tissue or organ. Stroma may include a compilation of cells such as fibroblasts/myofibroblasts, glial, epithelia, fat, immune, vascular, smooth muscle, and immune cells along with the extracellular matrix (ECM) and extracellular molecules. In various embodiments, the target (e.g. antigen, receptor) of interest is part of the non-cellular component of the stroma such as the extracellular matrix and extracellular molecules. As used herein, the ECM refers to the non-cellular components present within all tissues and organs. The ECM is composed of a large collection of biochemically distinct components including, without limitation, proteins, glycoproteins, proteoglycans, and polysaccharides. These components of the ECM are usually produced by adjacent cells and secreted into the ECM via exocytosis. Once secreted, the ECM components often aggregate to form a complex network of macromolecules. In various embodiments, the Fc-based chimeric protein complex of the invention comprises a targeting moiety that recognizes a target (e.g., an antigen or receptor or non-proteinaceous molecule) located on any component of the ECM. Illustrative components of the ECM include, without limitation, the proteoglycans, the non-proteoglycan polysaccharides, fibers, and other ECM proteins or ECM non-proteins, e.g. polysaccharides and/or lipids, or ECM associated molecules (e.g. proteins or non-proteins, e.g. polysaccharides, nucleic acids and/or lipids).

[0506] In some embodiments, the targeting moiety recognizes a target (e.g. antigen, receptor) on ECM proteoglycans. Proteoglycans are glycosylated proteins. The basic proteoglycan unit includes a core protein with one or more covalently attached glycosaminoglycan (GAG) chains. Proteoglycans have a net negative charge that attracts positively charged sodium ions (Na+), which attracts water molecules via osmosis, keeping the ECM and resident cells hydrated. Proteoglycans may also help to trap and store growth factors within the ECM. Illustrative proteoglycans that may be targeted by the Fc-based chimeric protein complexes of the invention include, but are not limited to, heparan sulfate, chondroitin sulfate, and keratan sulfate. In an embodiment, the targeting moiety recognizes a target (e.g. antigen, receptor) on non-proteoglycan polysaccharides such as hyaluronic acid.

[0507] In some embodiments, the targeting moiety recognizes a target (e.g. antigen, receptor) on ECM fibers. ECM fibers include collagen fibers and elastin fibers. In some embodiments, the targeting moiety recognizes one or more epitopes on collagens or collagen fibers. Collagens are the most abundant proteins in the ECM. Collagens are present in the ECM as fibrillar proteins and provide structural support to resident cells. In one or more embodiments, the targeting moiety recognizes and binds to various types of collagens present within the ECM including, without limitation, fibrillar collagens (types I, II, III, V, XI), facit collagens (types IX, XII, XIV), short chain collagens (types VIII, X), basement membrane collagens (type IV), and/or collagen types VI, VII, or XIII. Elastin fibers provide elasticity to tissues, allowing them to stretch when needed and then return to their original state. In some embodiments, the target moiety recognizes one or more epitopes on elastins or elastin fibers.

[0508] In some embodiments, the targeting moiety recognizes one or more ECM proteins including, but not limited to, a tenascin, a fibronectin, a fibrin, a laminin, or a nidogen/entactin.

[0509] In an embodiment, the targeting moiety recognizes and binds to tenascin. The tenascin (TN) family of glycoproteins includes at least four members, tenascin-C, tenascin-R, tenascin-X, and tenascin W. The primary structures of tenascin proteins include several common motifs ordered in the same consecutive sequence: amino-terminal heptad repeats, epidermal growth factor (EGF)-like repeats, fibronectin type Ill domain repeats, and a carboxyl-terminal fibrinogen-like globular domain. Each protein member is associated with typical variations in the number and nature of EGF-like and fibronectin type Ill repeats. Isoform variants also exist particularly with respect to tenascin-C. Over 27 splice variants and/or isoforms of tenascin-C are known. In a particular embodiment, the targeting moiety recognizes and binds to tenascin-CA1. Similarly, tenascin-R also has various splice variants and isoforms. Tenascin-R usually exists as dimers or trimers. Tenascin-X is the largest member of the tenascin family and is known to exist as trimers. Tenascin-W exists as trimers. In some embodiments, the targeting moiety recognizes one or more epitopes on a tenascin protein. In some embodiments, the targeting moiety recognizes the monomeric and/or the dimeric and/or the trimeric and/or the hexameric forms of a tenascin protein.

[0510] In some embodiments, the targeting moiety recognizes tenascin-CA1.

[0511] In some embodiments, the targeting moieties recognize and bind to fibronectin. Fibronectins are glycoproteins that connect cells with collagen fibers in the ECM, allowing cells to move through the ECM. Upon binding to integrins, fibronectins unfolds to form functional dimers. In some embodiments, the targeting moiety recognizes the monomeric and/or the dimeric forms of fibronectin. In some embodiments, the targeting moiety recognizes one or more epitopes on fibronectin. In illustrative embodiments, the targeting moiety recognizes fibronectin extracellular domain A (EDA) or fibronectin extracellular domain B (EDB). Elevated levels of EDA are associated with various diseases and disorders including psoriasis, rheumatoid arthritis, diabetes, and cancer. In some embodiments, the targeting moiety recognizes fibronectin that contains the EDA isoform and may be utilized to target the Fc-based chimeric protein complex to diseased cells including cancer cells. In some embodiments, the targeting moiety recognizes fibronectin that contains the EDB isoform. In various embodiments, such targeting moieties may be utilized to target the Fc-based chimeric protein complex to tumor cells including the tumor neovasculature.

[0512] In an embodiment, the targeting moiety recognizes and binds to fibrin. Fibrin is another protein substance often found in the matrix network of the ECM. Fibrin is formed by the action of the protease thrombin on fibrinogen which causes the fibrin to polymerize. In some embodiments, the targeting moiety recognizes one or more epitopes on fibrin. In some embodiments, the targeting moiety recognizes the monomeric as well as the polymerized forms of fibrin.

[0513] In an embodiment, the targeting moiety recognizes and binds to laminin. Laminin is a major component of the basal lamina, which is a protein network foundation for cells and organs. Laminins are heterotrimeric proteins that contain an α-chain, a μ-chain, and a γ-chain. In some embodiments, the targeting moiety recognizes one or more epitopes on laminin. In some embodiments, the targeting moiety recognizes the monomeric, the dimeric as well as the trimeric forms of laminin.

[0514] In an embodiment, the targeting moiety recognizes and binds to a nidogen or entactin. Nidogens/entactins are a family of highly conserved, sulfated glycoproteins. They make up the major structural component of the basement membranes and function to link laminin and collagen IV networks in basement membranes. Members of this family include nidogen-1 and nidogen-2. In various embodiments, the targeting moiety recognizes an epitope on nidogen-1 and/or nidogen-2.

[0515] In various embodiments, the targeting moiety comprises an antigen recognition domain that recognizes an epitope present on any of the targets described herein. In an embodiment, the antigen-recognition domain recognizes one or more linear epitopes present on the protein. As used herein, a linear epitope refers to any continuous sequence of amino acids present on the protein. In another embodiment, the antigen-recognition domain recognizes one or more conformational epitopes present on the protein. As used herein, a conformation epitope refers to one or more sections of amino acids (which may be discontinuous) which form a three-dimensional surface with features and/or shapes and/or tertiary structures capable of being recognized by an antigen recognition domain.

[0516] In various embodiments, the targeting moiety may bind to the full-length and/or mature forms and/or isoforms and/or splice variants and/or fragments and/or any other naturally occurring or synthetic analogs, variants, or mutants of any of the targets described herein. In various embodiments, the targeting moiety may bind to any forms of the proteins described herein, including monomeric, dimeric, trimeric, tetrameric, heterodimeric, multimeric and associated forms. In various embodiments, the targeting moiety may bind to any post-translationally modified forms of the proteins described herein, such as glycosylated and/or phosphorylated forms.

[0517] In various embodiments, the targeting moiety comprises an antigen recognition domain that recognizes extracellular molecules such as DNA. In some embodiments, the targeting moiety comprises an antigen recognition domain that recognizes DNA. In an embodiment, the DNA is shed into the extracellular space from necrotic or apoptotic tumor cells or other diseased cells.

[0518] In some embodiments, the targeting moiety comprises an antigen recognition domain that recognizes one or more non-cellular structures associated with atherosclerotic plaques. Two types of atherosclerotic plaques are known. The fibro-lipid (fibro-fatty) plaque is characterized by an accumulation of lipid-laden cells underneath the intima of the arteries. Beneath the endothelium there is a fibrous cap covering the atheromatous core of the plaque. The core includes lipid-laden cells (macrophages and smooth muscle cells) with elevated tissue cholesterol and cholesterol ester content, fibrin, proteoglycans, collagen, elastin, and cellular debris. In advanced plaques, the central core of the plaque usually contains extracellular cholesterol deposits (released from dead cells), which form areas of cholesterol crystals with empty, needle-like clefts. At the periphery of the plaque are younger foamy cells and capillaries. A fibrous plaque is also localized under the intima, within the wall of the artery resulting in thickening and expansion of the wall and, sometimes, spotty localized narrowing of the lumen with some atrophy of the muscular layer. The fibrous plaque contains collagen fibers (eosinophilic), precipitates of calcium (hematoxylinophilic) and lipid-laden cells. In some embodiments, the targeting moiety recognizes and binds to one or more of the non-cellular components of these plaques such as the fibrin, proteoglycans, collagen, elastin, cellular debris, and calcium or other mineral deposits or precipitates. In some embodiments, the cellular debris is a nucleic acid, e.g. DNA or RNA, released from dead cells.

[0519] In various embodiments, the targeting moiety comprises an antigen recognition domain that recognizes one or more non-cellular structures found in the brain plaques associated with neurodegenerative diseases. In some embodiments, the targeting moiety recognizes and binds to one or more non-cellular structures located in the amyloid plaques found in the brains of patients with Alzheimer's disease. For example, the targeting moiety may recognize and bind to the peptide amyloid beta, which is a major component of the amyloid plaques. In some embodiments, the targeting moiety recognizes and binds to one or more non-cellular structures located in the brains plaques found in patients with Huntington's disease. In various embodiments, the targeting moiety recognizes and binds to one or more non-cellular structures found in plaques associated with other neurodegenerative or musculoskeletal diseases such as Lewy body dementia and inclusion body myositis

[0520] In some embodiments, the targeting moiety is a protein-based agent capable of specific binding, such as an antibody or derivatives thereof.

### CD3 Targeting Moieties

[0521] In some embodiments, the present Fc-based chimeric protein complex has one or more targeting moieties directed against CD3 expressed on T cells. In some embodiments, the Fc-based chimeric protein complex has one or more targeting moieties which selectively bind a CD3 polypeptide. In some embodiments, the Fc-based chimeric protein complex comprises one or more antibodies, antibody derivatives or formats, peptides or polypeptides, or fusion proteins that selectively bind a CD3 polypeptide.

[0522] In some embodiments, the targeting moiety comprises the anti-CD3 antibody muromonab-CD3 (aka Orthoclone OKT3), or fragments thereof. Muromonab-CD3 is disclosed in U.S. Pat. No. 4,361,549 and Wilde et al. (1996) 51:865-894, the entire disclosures of which are hereby incorporated by reference. In illustrative embodiments, muromonab-CD3 or an antigen-binding fragment thereof for use in the methods provided herein comprises a heavy chain comprising the amino acid sequence of SEQ ID NO: 1234; and/or a light chain comprising the amino acid sequence of SEQ ID NO: 1235.

[0523] In some embodiments, the targeting moiety comprises the anti-CD3 antibody otelixizumab, or fragments thereof. Otelixizumab is disclosed in U.S. Patent Publication No. 20160000916 and Chatenoud et al. (2012) 9:372-381, the entire disclosures of which are hereby incorporated by reference. In illustrative embodiments, otelixizumab or an antigen-binding fragment thereof for use in the methods provided herein comprises a heavy chain comprising the amino acid sequence of SEQ ID NO: 1236; and/or a light chain comprising the amino acid sequence of SEQ ID NO: 1237.

[0524] In some embodiments, the targeting moiety comprises the anti-CD3 antibody teplizumab (AKA MGA031 and hOKT3γ1(Ala-Ala)), or fragments thereof. Teplizumab is disclosed in Chatenoud et al. (2012) 9:372-381, the entire disclosures of which are hereby incorporated by reference. In illustrative embodiments, teplizumab or an antigen-binding fragment thereof for use in the methods provided herein comprises a heavy chain comprising the amino acid sequence of SEQ ID NO: 1238; and/or a light chain comprising the amino acid sequence of SEQ ID NO: 1239.

[0525] In some embodiments, the targeting moiety comprises the anti-CD3 antibody visilizumab (AKA Nuvion®; HuM291), or fragments thereof. Visilizumab is disclosed in U.S. Pat. No. 5,834,597 and WO2004052397, and Cole et al., Transplantation (1999) 68:563-571, the entire disclosures of which are hereby incorporated by reference. In illustrative embodiments, visilizumab or an antigen-binding fragment thereof for use in the methods provided herein comprises a heavy chain variable region comprising the amino acid sequence of SEQ ID NO: 1240; and/or a light chain variable region comprising the amino acid sequence of SEQ ID NO: 1241.

[0526] In some embodiments, the targeting moiety comprises the anti-CD3 antibody foralumab (aka NI-0401), or fragments thereof. In various embodiments, the targeting moiety comprises any one of the anti-CD3 antibodies disclosed in US20140193399, U.S. Pat. No. 7,728,114, US20100183554, and U.S. Pat. No. 8,551,478, the entire disclosures of which are hereby incorporated by reference.

[0527] In illustrative embodiments, the anti-CD3 antibody or an antigen-binding fragment thereof for use in the methods provided herein comprises a heavy chain variable region comprising the amino acid sequence of SEQ ID Nos: 2 and 6 of U.S. Pat. No. 7,728,114 (SEQ ID NO: 1242 and 1243, respectively) and/or a light chain variable region comprising the amino acid sequence of SEQ ID NOs 4 and 8 of U.S. Pat. No. 7,728,114 (SEQ ID NO: 1244 and 1245).

[0528] In an embodiment, the targeting moiety comprises a heavy chain variable region comprising the amino acid sequence of SEQ ID NO:2 of U.S. Pat. No. 7,728,114 and a light chain variable region comprising the amino acid sequence of SEQ ID NO:4 of U.S. Pat. No. 7,728,114. In an embodiment, the targeting moiety comprises any one of the anti-CD3 antibodies disclosed in US2016/0168247, the entire contents of which are hereby incorporated by reference. In illustrative embodiments, the antibody or an antigen-binding fragment thereof for use in the methods provided herein comprises a heavy chain comprising an amino acid sequence selected from SEQ ID Nos: 6-9 of US2016/0168247 (SEQ ID Nos.: 1246-1249, respectively) and/or a light chain comprising an amino acid sequence selected from SEQ ID Nos: 10-12 of US2016/0168247 (SEQ ID Nos.: 1250-1252, respectively).

[0529] In an embodiment, the targeting moiety comprises any one of the anti-CD3 antibodies disclosed in US2015/0175699, the entire contents of which are hereby incorporated by reference. In illustrative embodiments, the antibody or an antigen-binding fragment thereof for use in the methods provided herein comprises a heavy chain comprising an amino acid sequence selected from SEQ ID No: 9 of US2015/0175699 (SEQ ID NO: 1253); and/or a light chain comprising an amino acid sequence selected from SEQ ID No: 10 of US2015/0175699 (SEQ ID NO: 1254).

[0530] In an embodiment, the targeting moiety comprises any one of the anti-CD3 antibodies disclosed in U.S. Pat. No. 8,784,821, the entire contents of which are hereby incorporated by reference. In illustrative embodiments, the antibody or an antigen-binding fragment thereof for use in the methods provided herein comprises a heavy chain comprising an amino acid sequence selected from SEQ ID Nos: 2, 18, 34, 50, 66, 82, 98 and 114 of U.S. Pat. No. 8,784,821 (SEQ ID Nos.: 1255, 1256, 1257, 1258, 1259, 1260, 1261, and 1262, respectively); and/or alight chain comprising an amino acid sequence selected from SEQ ID Nos: 10, 26, 42, 58, 74, 90, 106 and 122 of U.S. Pat. No. 8,784,821 (SEQ ID No.: 1263, 1264, 1265, 1266, 1267, 1268, 1269, and 1270, respectively).

[0531] In an embodiment, the targeting moiety comprises any one of the anti-CD3 binding constructs disclosed in US20150118252, the entire contents of which are hereby incorporated by reference. In illustrative embodiments, the antibody or an antigen-binding fragment thereof for use in the methods provided herein comprises a heavy chain comprising an amino acid sequence selected from SEQ ID Nos: 6 and 86 of US20150118252 (SEQ ID NO: 1271 and 1272, respectively); and/or a light chain comprising an amino acid sequence selected from SEQ ID No: 3 of US2015/0175699 (SEQ ID NO: 1273).

[0532] In an embodiment, the targeting moiety comprises any one of the anti-CD3 binding proteins disclosed in US2016/0039934, the entire contents of which are hereby incorporated by reference. In illustrative embodiments, the antibody or an antigen-binding fragment thereof for use in the methods provided herein comprises a heavy chain comprising an amino acid sequence selected from SEQ ID Nos: 6-9 of US2016/0039934 (SEQ ID Nos.: 1274-1277); and/or a light chain comprising an amino acid sequence selected from SEQ ID Nos: 1-4 of US2016/0039934 (SEQ ID Nos.: 1278-1281).

[0533] In various embodiments, the targeting moieties of the invention may comprise a sequence that targets CD3 which is at least about 60%, at least about 61%, at least about 62%, at least about 63%, at least about 64%, at least about 65%, at least about 66%, at least about 67%, at least about 68%, at least about 69%, at least about 70%, at least about 71%, at least about 72%, at least about 73%, at least about 74%, at least about 75%, at least about 76%, at least about 77%, at least about 78%, at least about 79%, at least about 80%, at least about 81%, at least about 82%, at least about 83%, at least about 84%, at least about 85%, at least about 86%, at least about 87%, at least about 88%, at least about 89%, at least about 90%, at least about 91%, at least about 92%, at least about 93%, at least about 94%, at least about 95%, at least about 96%, at least about 97%, at least about 98%, at least about 99%, or 100% identical to any of the sequences disclosed herein (e.g. about 60%, or about 61%, or about 62%, or about 63%, or about 64%, or about 65%, or about 66%, or about 67%, or about 68%, or about 69%, or about 70%, or about 71%, or about 72%, or about 73%, or about 74%, or about 75%, or about 76%, or about 77%, or about 78%, or about 79%, or about 80%, or about 81%, or about 82%, or about 83%, or about 84%, or about 85%, or about 86%, or about 87%, or about 88%, or about 89%, or about 90%, or about 91%, or about 92%, or about 93%, or about 94%, or about 95%, or about 96%, or about 97%, or about 98%, about 99% or about 100% sequence identity with any of the sequences disclosed herein).

[0534] In various embodiments, the targeting moieties of the invention may comprise any combination of heavy chain, light chain, heavy chain variable region, light chain variable region, complementarity determining region (CDR), and framework region sequences that target CD3 as disclosed herein. In various embodiments, the targeting moieties of the invention may comprise any heavy chain, light chain, heavy chain variable region, light chain variable region, complementarity determining region (CDR), and framework region sequences of the CD3-specific antibodies including, but not limited to, X35-3, VIT3, BMA030 (BW264/56), CLB-T3/3, CRIS7, YTH12.5, FI 11-409, CLB-T3.4.2, TR-66, WT32, SPv-T3b, 11D8, XIII-141, XIII-46, XIII-87, 12F6, T3/RW2-8C8, T3/RW2-4B6, OKT3D, M-T301, SMC2, WT31 and F101.01. These CD3-specific antibodies are well known in the art and, inter alia, described in Tunnacliffe (1989), Int. Immunol. 1, 546-550, the entire disclosures of which are hereby incorporated by reference.

[0535] Additional antibodies, antibody derivatives or formats, peptides or polypeptides, or fusion proteins that selectively bind or target CD3 are disclosed in US Patent Publication No. 2016/0000916, U.S. Pat. Nos. 4,361,549, 5,834,597, 6,491,916, 6,406,696, 6,143,297, 6,750,325 and International Publication No. WO 2004/052397, the entire disclosures of which are hereby incorporated by reference.

### CD20 Targeting Moieties

[0536] In various embodiments, the CD20 targeting moiety is a protein-based agent capable of specific binding to CD20. In various embodiments, the CD20 targeting moiety is a protein-based agent capable of specific binding to CD20 without neutralization of CD20. CD20 is a non-glycosylated member of the membrane-spanning 4-A (MS4A) family. It functions as a B cell specific differentiation antigen in both mouse and human. In particular, human CD20 cDNA encodes a transmembrane protein consisting of four hydrophobic membrane-spanning domains, two extracellular loops and intracellular N- and C-terminal regions.

[0537] In various embodiments, the CD20 targeting moiety comprises a targeting moiety having an antigen recognition domain that recognizes an epitope present on CD20. In an embodiment, the antigen-recognition domain recognizes one or more linear epitopes present on CD20. In some embodiments, a linear epitope refers to any continuous sequence of amino acids present on CD20. In another embodiment, the antigen-recognition domain recognizes one or more conformational epitopes present on CD20. As used herein, a conformation epitope refers to one or more sections of amino acids (which may be discontinuous) which form a three-dimensional surface with features and/or shapes and/or tertiary structures capable of being recognized by an antigen recognition domain.

[0538] In various embodiments, the CD20 targeting moiety may bind to the full-length and/or mature forms and/or isoforms and/or splice variants and/or fragments and/or any other naturally occurring or synthetic analogs, variants, or mutants of CD20 (e.g., human CD20). In various embodiments, the CD20 targeting moiety may bind to any forms of CD20 (e.g., human CD20), including monomeric, dimeric, trimeric, tetrameric, heterodimeric, multimeric and associated forms. In an embodiment, the CD20 targeting moiety binds to the monomeric form of CD20. In another embodiment, the CD20 targeting moiety binds to a dimeric form of CD20. In another embodiment, the CD20 targeting moiety binds to a tetrameric form of CD20. In a further embodiment, the CD20 targeting moiety to phosphorylated form of CD20, which may be either monomeric, dimeric, or tetrameric.

[0539] In an embodiment, the CD20 targeting moiety comprises a targeting moiety with an antigen recognition domain that recognizes one or more epitopes present on human CD20. In an embodiment, the human CD20 comprises the amino acid sequence of SEQ ID NO: 1346.

[0540] In various embodiments, the CD20 targeting moiety comprises a targeting moiety capable of specific binding. In various embodiments, the CD20 targeting moiety comprises a targeting moiety having an antigen recognition domain such as an antibody or derivatives thereof.

[0541] In some embodiments, the CD20 targeting moiety comprises a targeting moiety which is an antibody derivative or format. In some embodiments, the CD20 targeting moiety comprises a targeting moiety that is a single-domain antibody, a recombinant heavy-chain-only antibody (VHH), a single-chain antibody (scFv), a shark heavy-chain-only antibody (VNAR), a microprotein (cysteine knot protein, knottin), a DARPin; a Tetranectin; an Affibody; an Affimer, a Transbody; an Anticalin; an AdNectin; an Affilin; a Microbody; a peptide aptamer; an alterases; a plastic antibodies; a phylomer; a stradobodies; a maxibodies; an evibody; a fynomer, an armadillo repeat protein, a Kunitz domain, an avimer, an atrimer, a probody, an immunobody, a triomab, a troybody; a pepbody; a vaccibody, a UniBody; a DuoBody, a Fv, a Fab, a Fab′, a F(ab′)₂, a peptide mimetic molecule, or a small (e.g. synthetic or natural) molecule, e.g. without limitation, as described in US Patent Nos. or Patent Publication Nos. U.S. Pat. No. 7,417,130, US 2004/132094, U.S. Pat. No. 5,831,012, US 2004/023334, U.S. Pat. Nos. 7,250,297, 6,818,418, US 2004/209243, U.S. Pat. Nos. 7,838,629, 7,186,524, 6,004,746, 5,475,096, US 2004/146938, US 2004/157209, U.S. Pat. Nos. 6,994,982, 6,794,144, US 2010/239633, U.S. Pat. No. 7,803,907, US 2010/119446, and/or U.S. Pat. No. 7,166,697, the contents of which are hereby incorporated by reference in their entireties. See also, Storz MAbs. 2011 May-June; 3(3): 310-317.

[0542] In some embodiments, the CD20 targeting moiety comprises a targeting moiety that is a single-domain antibody, such as a VHH. The VHH may be derived from, for example, an organism that produces VHH antibody such as a camelid, a shark, or the VHH may be a designed VHH. VHHs are antibody-derived therapeutic proteins that contain the unique structural and functional properties of naturally-occurring heavy-chain antibodies. VHH technology is based on fully functional antibodies from camelids that lack light chains. These heavy-chain antibodies contain a single variable domain (V_{H}H) and two constant domains (CH2 and CH3). VHHs are commercially available under the trademark of NANOBODIES. In an embodiment, the CD20 targeting moiety comprises a Nanobody. In some embodiments, the single domain antibody as described herein is an immunoglobulin single variable domain or ISVD.

[0543] In some embodiments, the CD20 targeting moiety comprises a targeting moiety which is a VHH comprising a single amino acid chain having four “framework regions” or FRs and three “complementary determining regions” or CDRs. As used herein, “framework region” or “FR” refers to a region in the variable domain which is located between the CDRs. As used herein, “complementary determining region” or “CDR” refers to variable regions in VHHs that contains the amino acid sequences capable of specifically binding to antigenic targets.

[0544] In various embodiments, the CD20 targeting moiety comprises a VHH having a variable domain comprising at least one CDR1, CDR2, and/or CDR3 sequences.

[0545] In some embodiments, the CDR1 sequence is selected from SEQ ID Nos.: 1347-1366. In some embodiments, the CDR2 sequence is selected from SEQ ID Nos.: 1367-1383. In some embodiments, the CDR3 sequence is selected from SEQ ID Nos.: 1384-1396.

[0546] In various embodiments, the CD20 targeting moiety comprises a CDR1 comprising the amino acid sequence of SEQ ID NO: 1347, a CDR2 comprising the amino acid sequence of SEQ ID NO: 1367, and a CDR3 comprising the amino acid sequence of SEQ ID NO: 1384.

[0547] In various embodiments, the CD20 targeting moiety comprises a CDR1 comprising the amino acid sequence of SEQ ID NO: 1347, a CDR2 comprising the amino acid sequence of SEQ ID NO: 1368, and a CDR3 comprising the amino acid sequence of SEQ ID NO: 1384.

[0548] In various embodiments, the CD20 targeting moiety comprises a CDR1 comprising the amino acid sequence of SEQ ID NO: 1348, a CDR2 comprising the amino acid sequence of SEQ ID NO: 1367, and a CDR3 comprising the amino acid sequence of SEQ ID NO: 1384.

[0549] In various embodiments, the CD20 targeting moiety comprises a CDR1 comprising the amino acid sequence of SEQ ID NO: 1349, a CDR2 comprising the amino acid sequence of SEQ ID NO: 1367, and a CDR3 comprising the amino acid sequence of SEQ ID NO: 1384.

[0550] In various embodiments, the CD20 targeting moiety comprises a CDR1 comprising the amino acid sequence of SEQ ID NO: 1350, a CDR2 comprising the amino acid sequence of SEQ ID NO: 1369, and a CDR3 comprising the amino acid sequence of SEQ ID NO: 1385.

[0551] In various embodiments, the CD20 targeting moiety comprises a CDR1 comprising the amino acid sequence of SEQ ID NO: 1351, a CDR2 comprising the amino acid sequence of SEQ ID NO: 1370, and a CDR3 comprising the amino acid sequence of SEQ ID NO: 1386.

[0552] In various embodiments, the CD20 targeting moiety comprises a CDR1 comprising the amino acid sequence of SEQ ID NO: 1352, a CDR2 comprising the amino acid sequence of SEQ ID NO: 1371, and a CDR3 comprising the amino acid sequence of SEQ ID NO: 1387.

[0553] In various embodiments, the CD20 targeting moiety comprises a CDR1 comprising the amino acid sequence of SEQ ID NO: 1353, a CDR2 comprising the amino acid sequence of SEQ ID NO: 1371, and a CDR3 comprising the amino acid sequence of SEQ ID NO: 1388.

[0554] In various embodiments, the CD20 targeting moiety comprises a CDR1 comprising the amino acid sequence of SEQ ID NO: 1354, a CDR2 comprising the amino acid sequence of SEQ ID NO: 1372, and a CDR3 comprising the amino acid sequence of SEQ ID NO: 1389.

[0555] In various embodiments, the CD20 targeting moiety comprises a CDR1 comprising the amino acid sequence of SEQ ID NO: 1355, a CDR2 comprising the amino acid sequence of SEQ ID NO: 1373, and a CDR3 comprising the amino acid sequence of SEQ ID NO: 1390.

[0556] In various embodiments, the CD20 targeting moiety comprises a CDR1 comprising the amino acid sequence of SEQ ID NO: 1355, a CDR2 comprising the amino acid sequence of SEQ ID NO: 1374, and a CDR3 comprising the amino acid sequence of SEQ ID NO: 1390.

[0557] In various embodiments, the CD20 targeting moiety comprises a CDR1 comprising the amino acid sequence of SEQ ID NO: 1355, a CDR2 comprising the amino acid sequence of SEQ ID NO: 1375, and a CDR3 comprising the amino acid sequence of SEQ ID NO: 1390.

[0558] In various embodiments, the CD20 targeting moiety comprises a CDR1 comprising the amino acid sequence of SEQ ID NO: 1356, a CDR2 comprising the amino acid sequence of SEQ ID NO: 1374, and a CDR3 comprising the amino acid sequence of SEQ ID NO: 1390.

[0559] In various embodiments, the CD20 targeting moiety comprises a CDR1 comprising the amino acid sequence of SEQ ID NO: 1357, a CDR2 comprising the amino acid sequence of SEQ ID NO: 1376, and a CDR3 comprising the amino acid sequence of SEQ ID NO: 1391.

[0560] In various embodiments, the CD20 targeting moiety comprises a CDR1 comprising the amino acid sequence of SEQ ID NO: 1358, a CDR2 comprising the amino acid sequence of SEQ ID NO: 1377, and a CDR3 comprising the amino acid sequence of SEQ ID NO: 1392.

[0561] In various embodiments, the CD20 targeting moiety comprises a CDR1 comprising the amino acid sequence of SEQ ID NO: 1359, a CDR2 comprising the amino acid sequence of SEQ ID NO: 1377, and a CDR3 comprising the amino acid sequence of SEQ ID NO: 1392.

[0562] In various embodiments, the CD20 targeting moiety comprises a CDR1 comprising the amino acid sequence of SEQ ID NO: 1360, a CDR2 comprising the amino acid sequence of SEQ ID NO: 1377, and a CDR3 comprising the amino acid sequence of SEQ ID NO: 1392.

[0563] In various embodiments, the CD20 targeting moiety comprises a CDR1 comprising the amino acid sequence of SEQ ID NO: 1361, a CDR2 comprising the amino acid sequence of SEQ ID NO: 1378, and a CDR3 comprising the amino acid sequence of SEQ ID NO: 1392.

[0564] In various embodiments, the CD20 targeting moiety comprises a CDR1 comprising the amino acid sequence of SEQ ID NO: 1362, a CDR2 comprising the amino acid sequence of SEQ ID NO: 1379, and a CDR3 comprising the amino acid sequence of SEQ ID NO: 1392.

[0565] In various embodiments, the CD20 targeting moiety comprises a CDR1 comprising the amino acid sequence of SEQ ID NO: 1363, a CDR2 comprising the amino acid sequence of SEQ ID NO: 1377, and a CDR3 comprising the amino acid sequence of SEQ ID NO: 1392.

[0566] In various embodiments, the CD20 targeting moiety comprises a CDR1 comprising the amino acid sequence of SEQ ID NO: 1364, a CDR2 comprising the amino acid sequence of SEQ ID NO: 1380, and a CDR3 comprising the amino acid sequence of SEQ ID NO: 1393.

[0567] In various embodiments, the CD20 targeting moiety comprises a CDR1 comprising the amino acid sequence of SEQ ID NO: 1365, a CDR2 comprising the amino acid sequence of SEQ ID NO: 1381, and a CDR3 comprising the amino acid sequence of SEQ ID NO: 1394.

[0568] In various embodiments, the CD20 targeting moiety comprises a CDR1 comprising the amino acid sequence of SEQ ID NO: 1366, a CDR2 comprising the amino acid sequence of SEQ ID NO: 1382, and a CDR3 comprising the amino acid sequence of SEQ ID NO: 1395.

[0569] In various embodiments, the CD20 targeting moiety comprises a CDR1 comprising the amino acid sequence of SEQ ID NO: 1366, a CDR2 comprising the amino acid sequence of SEQ ID NO: 1383, and a CDR3 comprising the amino acid sequence of SEQ ID NO: 1396.

[0570] In various embodiments, the CD20 targeting moiety comprises an amino acid sequence selected from the following sequences: 2HCD16 (SEQ ID NO: 1397); 2HCD22 (SEQ ID NO: 1398); 2HCD35 (SEQ ID NO: 1399); 2HCD42 (SEQ ID NO: 1400); 2HCD73 (SEQ ID NO: 1401); 2HCD81 (SEQ ID NO: 1402); R3CD105 (SEQ ID NO: 1403); R3CD18 (SEQ ID NO: 1404); R3CD7 (SEQ ID NO: 1405); 2HCD25 (SEQ ID NO: 1406); 2HCD78 (SEQ ID NO: 1407); 2HCD17 (SEQ ID NO: 1408); 2HCD40 (SEQ ID NO: 1409); 2HCD88 (SEQ ID NO: 1410); 2HCD59 (SEQ ID NO: 1411); 2HCD68 (SEQ ID NO: 1412); 2HCD43 (SEQ ID NO: 1413); 2MC57 (SEQ ID NO: 1414); R2MUC70 (SEQ ID NO: 1415); R3MUC17 (SEQ ID NO: 1416); R3MUC56 (SEQ ID NO: 1417); R3MUC57 (SEQ ID NO: 1418); R3MUC58 (SEQ ID NO: 1419); R2MUC85 (SEQ ID NO: 1420); R3MUC66 (SEQ ID NO: 1421); R2MUC21 (SEQ ID NO: 1422); 2MC52 (SEQ ID NO: 1423); R3MUC22 (SEQ ID NO: 1424); R3MUC75 (SEQ ID NO: 1425); 2MC39 (SEQ ID NO: 1426); 2MC51 (SEQ ID NO: 1427); 2MC38 (SEQ ID NO: 1428); 2MC82 (SEQ ID NO: 1429); 2MC20 (SEQ ID NO: 1430); 2MC42 (SEQ ID NO:1431); R2MUC36 (SEQ ID NO: 1432); R3MCD137 (SEQ ID NO: 1433); or R3MCD22 (SEQ ID NO: 1434).

[0571] In some embodiments, the CD20 targeting moiety comprises an amino acid sequence selected from SEQ ID NOs: 1397-1434 (provided above) without the terminal histidine tag sequence (i.e., HHHHHH; SEQ ID NO: 393).

[0572] In some embodiments, the CD20 targeting moiety comprises an amino acid sequence selected from SEQ ID NOs: 1397-1434 (provided above) without the HA tag (i.e., YPYDVPDYGS; SEQ ID NO: 394).

[0573] In some embodiments, the CD20 targeting moiety comprises an amino acid sequence selected from SEQ ID NOs: 1397-1434 (provided above) without the AAA linker (i.e., AAA).

[0574] In some embodiments, the CD20 targeting moiety comprises an amino acid sequence selected from SEQ ID NOs: 1397-1434 (provided above) without the AAA linker and HA tag.

[0575] In some embodiments, the CD20 targeting moiety comprises an amino acid sequence selected from SEQ ID NOs: 1397-1434 (provided above) without the AAA linker, HA tag, and terminal histidine tag sequence (i.e., AAAYPYDVPDYGSHHHHHH; SEQ ID NO: 395).

[0576] In various embodiments, the present technology contemplates the use of any natural or synthetic analogs, mutants, variants, alleles, homologs and orthologs (herein collectively referred to as “analogs”) of the CD20 targeting moiety as described herein. In various embodiments, the amino acid sequence of the CD20 targeting moiety further includes an amino acid analog, an amino acid derivative, or other non-classical amino acids.

[0577] In various embodiments, the CD20 targeting moiety comprises a targeting moiety comprising a sequence that is at least 60% identical to any one of the CD20 sequences disclosed above. In various embodiments, the CD20 targeting moiety comprises a sequence that is at least 60% identical to any one of the CD20 sequences disclosed above minus the linker sequence, the HA tag and/or the HIS₆ tag. For example, the CD20 targeting moiety may comprise a sequence that is at least about 60%, at least about 61%, at least about 62%, at least about 63%, at least about 64%, at least about 65%, at least about 66%, at least about 67%, at least about 68%, at least about 69%, at least about 70%, at least about 71%, at least about 72%, at least about 73%, at least about 74%, at least about 75%, at least about 76%, at least about 77%, at least about 78%, at least about 79%, at least about 80%, at least about 81%, at least about 82%, at least about 83%, at least about 84%, at least about 85%, at least about 86%, at least about 87%, at least about 88%, at least about 89%, at least about 90%, at least about 91%, at least about 92%, at least about 93%, at least about 94%, at least about 95%, at least about 96%, at least about 97%, at least about 98%, at least about 99%, or 100% identical to any one of the CD20 sequences disclosed herein (e.g. about 60%, or about 61%, or about 62%, or about 63%, or about 64%, or about 65%, or about 66%, or about 67%, or about 68%, or about 69%, or about 70%, or about 71%, or about 72%, or about 73%, or about 74%, or about 75%, or about 76%, or about 77%, or about 78%, or about 79%, or about 80%, or about 81%, or about 82%, or about 83%, or about 84%, or about 85%, or about 86%, or about 87%, or about 88%, or about 89%, or about 90%, or about 91%, or about 92%, or about 93%, or about 94%, or about 95%, or about 96%, or about 97%, or about 98%, about 99% or about 100% sequence identity to any one of the CD20 sequences disclosed herein).

[0578] In various embodiments, the CD20 targeting moiety comprises an amino acid sequence having one or more amino acid mutations. In various embodiments, the CD20 targeting moiety comprises an amino acid sequence having one, or two, or three, or four, or five, or six, or seen, or eight, or nine, or ten, or fifteen, or twenty amino acid mutations with respect to any one of the CD20 sequences disclosed above. In some embodiments, the one or more amino acid mutations may be independently selected from substitutions, insertions, deletions, and truncations.

[0579] In some embodiments, the amino acid mutations are amino acid substitutions, and may include conservative and/or non-conservative substitutions.

[0580] “Conservative substitutions” may be made, for instance, on the basis of similarity in polarity, charge, size, solubility, hydrophobicity, hydrophilicity, and/or the amphipathic nature of the amino acid residues involved. The 20 naturally occurring amino acids can be grouped into the following six standard amino acid groups: (1) hydrophobic: Met, Ala, Val, Leu, Ile; (2) neutral hydrophilic: Cys, Ser, Thr; Asn, Gln; (3) acidic: Asp, Glu; (4) basic: His, Lys, Arg; (5) residues that influence chain orientation: Gly, Pro; and (6) aromatic: Trp, Tyr, Phe.

[0581] As used herein, “conservative substitutions” are defined as exchanges of an amino acid by another amino acid listed within the same group of the six standard amino acid groups shown above. For example, the exchange of Asp by Glu retains one negative charge in the so modified polypeptide. In addition, glycine and proline may be substituted for one another based on their ability to disrupt α-helices.

[0582] As used herein, “non-conservative substitutions” are defined as exchanges of an amino acid by another amino acid listed in a different group of the six standard amino acid groups (1) to (6) shown above.

[0583] In various embodiments, the substitutions may also include non-classical amino acids (e.g. selenocysteine, pyrrolysine, N-formylmethionine β-alanine, GABA and δ-Aminolevulinic acid, 4-aminobenzoic acid (PABA), D-isomers of the common amino acids, 2,4-diaminobutyric acid, α-amino isobutyric acid, 4-aminobutyric acid, Abu, 2-amino butyric acid, γ-Abu, ε-Ahx, 6-amino hexanoic acid, Aib, 2-amino isobutyric acid, 3-amino propionic acid, ornithine, norleucine, norvaline, hydroxyproline, sarcosme, citrulline, homocitrulline, cysteic acid, t-butylglycine, t-butylalanine, phenylglycine, cyclohexylalanine, β-alanine, fluoro-amino acids, designer amino acids such as p methyl amino acids, C α-methyl amino acids, N α-methyl amino acids, and amino acid analogs in general).

[0584] In various embodiments, the amino acid mutation may be in the CDRs of the targeting moiety (e.g., the CDR1, CDR2 or CDR3 regions). In another embodiment, amino acid alteration may be in the framework regions (FRs) of the targeting moiety (e.g., the FR1, FR2, FR3, or FR4 regions).

[0585] Modification of the amino acid sequences may be achieved using any known technique in the art e.g., site-directed mutagenesis or PCR based mutagenesis. Such techniques are described, for example, in Sambrook et al., Molecular Cloning: A Laboratory Manual, Cold Spring Harbor Press, Plainview, N.Y., 1989 and Ausubel et al., Current Protocols in Molecular Biology, John Wiley & Sons, New York, N.Y., 1989.

[0586] In various embodiments, the mutations do not substantially reduce the CD20 targeting moiety's capability to specifically bind to CD20. In various embodiments, the mutations do not substantially reduce the CD20 targeting moiety's capability to specifically bind to CD20 without neutralizing CD20.

[0587] In various embodiments, the binding affinity of the CD20 targeting moiety for the full-length and/or mature forms and/or isoforms and/or splice variants and/or fragments and/or monomeric and/or dimeric and/or tetrameric forms and/or any other naturally occurring or synthetic analogs, variants, or mutants (including monomeric and/or dimeric and/or tetrameric forms) of human CD20 may be described by the equilibrium dissociation constant (K_{D}). In various embodiments, the CD20 targeting moiety comprises a targeting moiety that binds to the full-length and/or mature forms and/or isoforms and/or splice variants and/or fragments and/or any other naturally occurring or synthetic analogs, variants, or mutants (including monomeric and/or dimeric and/or tetrameric forms) of human CD20 with a K_{D} of less than about 1 μM, about 900 nM, about 800 nM, about 700 nM, about 600 nM, about 500 nM, about 400 nM, about 300 nM, about 200 nM, about 100 nM, about 90 nM, about 80 nM, about 70 nM, about 60 nM, about 50 nM, about 40 nM, about 30 nM, about 20 nM, about 10 nM, or about 5 nM, or about 4.5 nM, or about 1 nM.

[0588] In various embodiments, the CD20 targeting moiety comprises a targeting moiety that binds but does not functionally modulate the antigen of interest, i.e., CD20. For instance, in various embodiments, the targeting moiety of the CD20 targeting moiety simply targets the antigen but does not substantially functionally modulate (e.g. substantially inhibit, reduce or neutralize) a biological effect that the antigen has. In various embodiments, the CD20 targeting moiety binds an epitope that is physically separate from an antigen site that is important for its biological activity (e.g. an antigen's active site).

[0589] Such binding without significant function modulation finds use in various embodiments of the present application. In various embodiments, the CD20 targeting moiety binds to CD20 positive cells and induces the death of such cells. In some embodiments, the CD20 targeting moiety induces cell death as mediated by one or more of apoptosis or direct cell death, complement-dependent cytotoxicity (CDC), antibody-dependent cellular cytotoxicity (ADCC), and/or or antibody-dependent cellular phagocytosis (ADCP). In some embodiments, the present CD20 targeting moiety induces translocation of CD20 into large lipid microdomains or ‘lipid rafts’ within the plasma membrane upon binding. This clustering process enhances the activation of complement and exerts strong complement-dependent cytotoxicity (CDC). In other embodiments, the CD20 targeting moiety induces direct cell death. In alternative embodiments, the therapeutic efficacy of the CD20 targeting moiety is not dependent on B cell depletion.

[0590] In various embodiments, the CD20 targeting moiety may be used to directly or indirectly recruit active immune cells to a site of need via an effector antigen. For example, in various embodiments, the CD20 targeting moiety may be used to directly or indirectly recruit an immune cell to a cancer or tumor cell in a method of reducing or eliminating a cancer or tumor (e.g. the CD20 targeting moiety may comprise an anti-CD20 antigen recognition domain and a targeting moiety having a recognition domain (e.g. antigen recognition domain) directed against Clec9A, which is an antigen expressed on dendritic cells). In these embodiments, CD20 signaling is an important piece of the cancer reducing or eliminating effect. In various embodiments, the CD20 targeting moiety may recruit a T cell, a B cell, a dendritic cell, a macrophage, and a natural killer (NK) cell.

### Bispecific and Multispecific Targeting Moiety Formats

[0591] In some embodiments, the Fc-based chimeric protein complexes of the present technology comprise one or more targeting moieties disclosed herein. In various embodiments, the Fc-based chimeric protein complexes have targeting moieties that target two different cells (e.g. to make a synapse) or the same cell (e.g. to get a more concentrated human IFNγ or human TNFα signaling agent effect). In various embodiments, the Fc-based chimeric protein complexes have two or more copies of the same targeting moiety (multivalency), e.g. to increase the affinity of target binding.

[0592] In various embodiments, the Fc-based chimeric protein complexes of the present technology are multi-specific, i.e., the Fc-based chimeric protein complex comprises two or more targeting moieties having recognition domains (e.g. antigen recognition domains) that recognize and bind two or more targets (e.g. antigens, or receptors, or epitopes). In such embodiments, the Fc-based chimeric protein complexes may comprise two more targeting moieties having recognition domains that recognize and bind two or more epitopes on the same antigen or on different antigens or on different receptors. In various embodiments, such multi-specific Fc-based chimeric protein complexes exhibit advantageous properties such as increased avidity and/or improved selectivity. In some embodiments, the Fc-based chimeric protein complex comprises two targeting moieties and is bispecific, i.e., binds and recognizes two epitopes on the same antigen or on different antigens or different receptors. Accordingly, in various embodiments, the Fc-based chimeric protein complex encompasses such multi-specific Fc-based chimeric protein complexes comprising two or more targeting moieties.

[0593] In various embodiments, the multi-specific Fc-based chimeric protein complexes comprises two or more targeting moieties with each targeting moiety being an antibody or an antibody derivative as described herein. In an embodiment, the multi-specific Fc-based chimeric protein complex comprises at least one VHH comprising an antigen recognition domain against one target and one antibody or antibody derivative comprising a recognition domain against a tumor antigen and/or an immune cell marker.

[0594] In various embodiments, the present multi-specific Fc-based chimeric protein complexes have two or more targeting moieties that target different antigens or receptors, and one targeting moiety may be attenuated for its antigen or receptor, e.g. the targeting moiety binds its antigen or receptor with a low affinity or avidity (including, for example, at an affinity or avidity that is less than the affinity or avidity the other targeting moiety has for its for its antigen or receptor, for instance the difference between the binding affinities may be about 10-fold, or 25-fold, or 50-fold, or 100-fold, or 300-fold, or 500-fold, or 1000-fold, or 5000-fold; for instance the lower affinity or avidity targeting moiety may bind its antigen or receptor at a K_{D} in the mid- to high-nM or low- to mid-μM range while the higher affinity or avidity targeting moiety may bind its antigen or receptor at a K_{D} in the mid- to high-μM or low- to mid-nM range). For instance, in some embodiments, the present multi-specific Fc-based chimeric protein complex comprises an attenuated targeting moiety that is directed against a promiscuous antigen or receptor, which may improve targeting to a cell of interest (e.g. via the other targeting moiety) and prevent effects across multiple types of cells, including those not being targeted for therapy (e.g. by binding promiscuous antigen or receptor at a higher affinity than what is provided in these embodiments).

[0595] The multi-specific Fc-based chimeric protein complexes may be constructed using methods known in the art, see for example, U.S. Pat. No. 9,067,991, U.S. Patent Publication No. 20110262348 and WO 2004/041862, the entire contents of which are hereby incorporated by reference. In an illustrative embodiment, the multi-specific Fc-based chimeric protein complex comprising two or more targeting moieties may be constructed by chemical crosslinking, for example, by reacting amino acid residues with an organic derivatizing agent as described by Blattler et al., Biochemistry 24, 1517-1524 and EP294703, the entire contents of which are hereby incorporated by reference. In another illustrative embodiment, the multi-specific Fc-based chimeric protein complex comprising two or more targeting moieties is constructed by genetic fusion, i.e., constructing a single polypeptide which includes the polypeptides of the individual targeting moieties. For example, a single polypeptide construct may be formed which encodes a first VHH with an antigen recognition domain against a first target and a second antibody or antibody derivative with an antigen recognition domain against e.g., a tumor antigen or a checkpoint inhibitor. A method for producing bivalent or multivalent VHH polypeptide constructs is disclosed in PCT patent application WO 96/34103, the entire contents of which is hereby incorporated by reference. In a further illustrative embodiment, the multi-specific Fc-based chimeric protein complex may be constructed by using linkers. For example, the carboxy-terminus of a first VHH with an antigen recognition domain against a first target may be linked to the amino-terminus of a second antibody or antibody derivative with an antigen recognition domain against e.g., a tumor antigen or a checkpoint inhibitor (or vice versa). Illustrative linkers that may be used are described herein. In some embodiments, the components of the multi-specific Fc-based chimeric protein complex are directly linked to each other without the use of linkers.

[0596] In various embodiments, the multi-specific Fc-based chimeric protein complex recognizes and binds to a target (e.g., XCR1, Clec9A, FAP, PD-1, PD-L1, PD-L2, SIRP1α, or CD8) and one or more antigens found on one or more immune cells, which can include, without limitation, megakaryocytes, thrombocytes, erythrocytes, mast cells, basophils, neutrophils, eosinophils, monocytes, macrophages, natural killer cells, T lymphocytes (e.g., cytotoxic T lymphocytes, T helper cells, natural killer T cells), B lymphocytes, plasma cells, dendritic cells, or subsets thereof. In some embodiments, the Fc-based chimeric protein complex specifically binds to an antigen of interest and effectively directly or indirectly recruits one of more immune cells.

[0597] In various embodiments, the multi-specific Fc-based chimeric protein complex recognizes and binds to target (e.g., XCR1, Clec9A, FAP, PD-1, PD-L1, PD-L2, SIRP1α, or CD8) and one or more antigens found on tumor cells. In these embodiments, the present Fc-based chimeric protein complex may directly or indirectly recruit an immune cell to a tumor cell or the tumor microenvironment. In some embodiments, the present Fc-based chimeric protein complex may directly or indirectly recruit an immune cell, e.g. an immune cell that can kill and/or suppress a tumor cell (e.g., a CTL), to a site of action (such as, by way of non-limiting example, the tumor microenvironment). In some embodiments, the present Fc-based chimeric protein complex enhances antigen presentation (e.g. tumor antigen presentation) by dendritic cells for the induction of a potent humoral and cytotoxic T cell response.

[0598] In some embodiments, the Fc-based chimeric protein complex may have two or more targeting moieties that bind to non-cellular structures. In some embodiments, there are two targeting moieties and one targets a cell while the other targets a non-cellular structure.

[0599] In some embodiments, the present Fc-based chimeric protein complex has (i) one or more of the targeting moieties which is directed against an immune cell selected from a T cell, a B cell, a dendritic cell, a macrophage, a NK cell, or subsets thereof and (ii) one or more of the targeting moieties which is directed against a tumor cell, along with the human IFNγ or human TNFα signaling agents described herein. In one embodiment, the Fc-based chimeric protein complex has (i) a targeting moiety directed against a T cell (including, without limitation an effector T cell) and (ii) a targeting moiety is directed against a tumor cell, along with the human IFNγ or human TNFα signaling agents described herein. In one embodiment, the present Fc-based chimeric protein complex has (i) a targeting moiety directed against a B cell and (ii) a targeting moiety is directed against a tumor cell, along with the human IFNγ or human TNFα signaling agents described herein. In one embodiment, the present Fc-based chimeric protein complex has (i) a targeting moiety directed against a dendritic cell and (ii) a targeting moiety is directed against a tumor cell, along with the human IFNγ or human TNFα signaling agents described herein. In one embodiment, the present Fc-based chimeric protein complex has (i) a targeting moiety directed against a macrophage and (ii) a targeting moiety is directed against a tumor cell, along with the human IFNγ or human TNFα signaling agents described herein. In one embodiment, the present Fc-based chimeric protein complex has (i) a targeting moiety directed against a NK cell and (ii) a targeting moiety is directed against a tumor cell, along with the human IFNγ or human TNFα signaling agents described herein.

[0600] By way of non-limiting example, in various embodiments, the present Fc-based chimeric protein complex has (i) a targeting moiety directed against a T cell, for example, mediated by targeting to CD8, SLAMF4, IL-2 R α, 4-1BB/TNFRSF9, IL-2 R β, ALCAM, B7-1, IL-4 R, B7-H3, BLAME/SLAMFS, CEACAM1, IL-6 R, CCR3, IL-7 Ra, CCR4, CXCRI/IL-S RA, CCR5, CCR6, IL-10R α, CCR 7, IL-I 0 R β, CCRS, IL-12 R β1, CCR9, IL-12 R β2, CD2, IL-13 R α 1, IL-13, CD3, CD4, ILT2/CDS5j, ILT3/CDS5k, ILT4/CDS5d, ILT5/CDS5a, lutegrin α 4/CD49d, CDS, Integrin α E/CD103, CD6, Integrin α M/CD 11 b, CDS, Integrin α X/CD11c, Integrin β 2/CDIS, KIR/CD15S, CD27/TNFRSF7, KIR2DL1, CD2S, KIR2DL3, CD30/TNFRSFS, KIR2DL4/CD15Sd, CD31/PECAM-1, KIR2DS4, CD40 Ligand/TNFSF5, LAG-3, CD43, LAIR1, CD45, LAIR2, CDS3, Leukotriene B4-R1, CDS4/SLAMF5, NCAM-L1, CD94, NKG2A, CD97, NKG2C, CD229/SLAMF3, NKG2D, CD2F-10/SLAMF9, NT-4, CD69, NTB-A/SLAMF6, Common γ Chain/IL-2 Ry, Osteopontin, CRACC/SLAMF7, PD-1, CRTAM, PSGL-1, CTLA-4, RANK/TNFRSF11A, CX3CR1, CX3CL1, L-Selectin, CXCR3, SIRP β 1, CXCR4, SLAM, CXCR6, TCCR/WSX-1, DNAM-1, Thymopoietin, EMMPRIN/CD147, TIM-1, EphB6, TIM-2, Fas/TNFRSF6, TIM-3, Fas Ligand/TNFSF6, TIM-4, Fcγ RIII/CD16, TIM-6, TNFR1/TNFRSF1A, Granulysin, TNF RIII/TNFRSF1B, TRAIL RI/TNFRSFIOA, ICAM-1/CD54, TRAIL R2/TNFRSF10B, ICAM-2/CD102, TRAILR3/TNFRSF10C, IFN-γR1, TRAILR4/TNFRSF10D, IFN-γ R2, TSLP, IL-1 R1, or TSLP R; and (ii) a targeting moiety is directed against a tumor cell, along with a human IFNγ or human TNFα signaling agent described herein.

[0601] By way of non-limiting example, in various embodiments, the present Fc-based chimeric protein complex has a targeting moiety directed against (i) a checkpoint marker expressed on a T cell, e.g. one or more of PD-1, CD28, CTLA4, ICOS, BTLA, KIR, LAG3, CD137, OX40, CD27, CD40L, TIM3, and A2aR and (ii) a targeting moiety is directed against a tumor cell, along with the human IFNγ or human TNFα signaling agents described herein.

[0602] In one embodiment, the present Fc-based chimeric protein complex has (i) a targeting moiety directed against a T cell, for example, mediated by targeting to CD8 and (ii) a targeting moiety is directed against a tumor cell, along with the human IFNγ or human TNFα signaling agents described herein. In an embodiment, the present Fc-based chimeric protein complex has a targeting moiety directed against CD8 on T cells and a second targeting moiety directed against PD-L1 or PD-L2 on tumor cells.

[0603] In one embodiment, the present Fc-based chimeric protein complex has (i) a targeting moiety directed against a T cell, for example, mediated by targeting to CD4 and (ii) a targeting moiety is directed against a tumor cell, along with the human IFNγ or human TNFα signaling agents described herein. In an embodiment, the present Fc-based chimeric protein complex has a targeting moiety directed against CD4 on T cells and a second targeting moiety directed against PD-L1 or PD-L2 on tumor cells.

[0604] In one embodiment, the present Fc-based chimeric protein complex has (i) a targeting moiety directed against a T cell, for example, mediated by targeting to CD3, CXCR3, CCR4, CCR9, CD70, CD103, or one or more immune checkpoint markers and (ii) a targeting moiety is directed against a tumor cell, along with the human IFNγ or human TNFα signaling agents described herein. In an embodiment, the present Fc-based chimeric protein complex has a targeting moiety directed against CD3 on T cells and a second targeting moiety directed against PD-L1 or PD-L2 on tumor cells.

[0605] In one embodiment, the present Fc-based chimeric protein complex has (i) a targeting moiety directed against a T cell, for example, mediated by targeting to PD-1 and (ii) a targeting moiety is directed against a tumor cell, along with the human IFNγ or human TNFα signaling agents described herein.

[0606] By way of non-limiting example, in various embodiments, the present Fc-based chimeric protein complex has (i) a targeting moiety directed against a B cell, for example, mediated by targeting to CD10, CD19, CD20, CD21, CD22, CD23, CD24, CD37, CD38, CD39, CD40, CD70, CD72, CD73, CD74, CDw75, CDw76, CD77, CD78, CD79a/b, CD80, CD81, CD82, CD83, CD84, CD85, CD86, CD89, CD98, CD126, CD127, CDw130, CD138, or CDw150; and (ii) a targeting moiety is directed against a tumor cell, along with the human IFNγ or human TNFα signaling agents described herein. In an embodiment, the present Fc-based chimeric protein complex has a targeting moiety directed against CD20.

[0607] In one embodiment, the present Fc-based chimeric protein complex has (i) a targeting moiety directed against a B cell, for example, mediated by targeting to CD19, CD20 or CD70 and (ii) a targeting moiety is directed against a tumor cell, along with the human IFNγ or human TNFα signaling agents described herein.

[0608] In one embodiment, the present Fc-based chimeric protein complex has (i) a targeting moiety directed against a B cell, for example, mediated by targeting to CD20 and (ii) a targeting moiety is directed against a tumor cell, along with the human IFNγ or human TNFα signaling agents described herein. In an embodiment, the present has a targeting moiety directed against CD20 on B cells and a second targeting moiety directed against PD-L1 or PD-L2 on tumor cells.

[0609] By way of non-limiting example, in various embodiments, the present Fc-based chimeric protein complex has (i) a targeting moiety directed against a NK cell, for example, mediated by targeting to 2B4/SLAMF4, KIR2DS4, CD155/PVR, KIR3DL1, CD94, LMIR1/CD300A, CD69, LMIR2/CD300c, CRACC/SLAMF7, LMIR3/CD300LF, DNAM-1, LMIR5/CD300LB, Fc-epsilon RII, LMIR6/CD300LE, Fc-γ RI/CD64, MICA, Fc-γ RIIB/CD32b, MICB, Fc-γ RIIC/CD32c, MULT-1, Fc-γ RIIA/CD32a, Nectin-2/CD112, Fc-γ RIII/CD16, NKG2A, FcRH1/IRTA5, NKG2C, FcRH2/IRTA4, NKG2D, FcRH4/IRTA1, NKp30, FcRH5/IRTA2, NKp44, Fc-Receptor-like 3/CD16-2, NKp46/NCR1, NKp80/KLRF1, NTB-A/SLAMF6, Rae-1, Rae-1 α, Rae-1 β, Rae-1 delta, H60, Rae-1 epsilon, ILT2/CD85j, Rae-1 γ, ILT3/CD85k, TREM-1, ILT4/CD85d, TREM-2, ILT5/CD85a, TREM-3, KIR/CD158, TREML1/TLT-1, KIR2DL1, ULBP-1, KIR2DL3, ULBP-2, KIR2DL4/CD158d, or ULBP-3; and (ii) a targeting moiety is directed against a tumor cell, along with the human IFNγ or human TNFα signaling agents described herein.

[0610] In one embodiment, the present Fc-based chimeric protein complex has (i) a targeting moiety directed against a NK cell, for example, mediated by targeting to Kir1alpha, DNAM-1 or CD64 and (ii) a targeting moiety is directed against a tumor cell, along with the human IFNγ or human TNFα signaling agents described herein.

[0611] In one embodiment, the present Fc-based chimeric protein complex has (i) a targeting moiety directed against a NK cell, for example, mediated by targeting to KIR1 and (ii) a targeting moiety is directed against a tumor cell, along with the human IFNγ or human TNFα signaling agents described herein. In an embodiment, the present Fc-based chimeric protein complex has a targeting moiety directed against KIR1 on NK cells and a second targeting moiety directed against PD-L1 or PD-L2 on tumor cells.

[0612] In one embodiment, the present Fc-based chimeric protein complex has (i) a targeting moiety directed against a NK cell, for example, mediated by targeting to TIGIT or KIR1 and (ii) a targeting moiety is directed against a tumor cell, along with the human IFNγ or human TNFα signaling agents described herein. In an embodiment, the present Fc-based chimeric protein complex has a targeting moiety directed against TIGIT on NK cells and a second targeting moiety directed against PD-L1 or PD-L2 on tumor cells.

[0613] By way of non-limiting example, in various embodiments, the present Fc-based chimeric protein complex has (i) a targeting moiety directed against a dendritic cell, for example, mediated by targeting to CLEC-9A, XCR1, RANK, CD36/SRB3, LOX-1/SR-E1, CD68, MARCO, CD163, SR-A1/MSR, CD5L, SREC-1, CL-PI/COLEC12, SREC-II, LIMPIIISRB2, RP105, TLR4, TLR1, TLR5, TLR2, TLR6, TLR3, TLR9, 4-IBB Ligand/TNFSF9, IL-12/IL-23 p40, 4-Amino-1,8-naphthalimide, ILT2/CD85j, CCL21/6Ckine, ILT3/CD85k, 8-oxo-dG, ILT4/CD85d, 8D6A, ILT5/CD85a, A2B5, lutegrin α 4/CD49d, Aag, Integrin β 2/CD18, AMICA, Langerin, B7-2/CD86, Leukotriene B4 RI, B7-H3, LMIR1/CD300A, BLAME/SLAMF8, LMIR2/CD300c, C1q R1/CD93, LMIR3/CD300LF, CCR6, LMIR5/CD300LB CCR7, LMIR6/CD300LE, CD40/TNFRSF5, MAG/Siglec-4-a, CD43, MCAM, CD45, MD-1, CD68, MD-2, CD83, MDL-1/CLEC5A, CD84/SLAMF5, MMR, CD97, NCAMLI, CD2F-10/SLAMF9, Osteoactivin GPNMB, Chern 23, PD-L2, CLEC-1, RP105, CLEC-2, Siglec-2/CD22, CRACC/SLAMF7, Siglec-3/CD33, DC-SIGN, Siglec-5, DC-SIGNR/CD299, Siglec-6, DCAR, Siglec-7, DCIR/CLEC4A, Siglec-9, DEC-205, Siglec-10, Dectin-1/CLEC7A, Siglec-F, Dectin-2/CLEC6A, SIGNR1/CD209, DEP-1/CD148, SIGNR4, DLEC, SLAM, EMMPRIN/CD147, TCCR/WSX-1, Fc-γ R1/CD64, TLR3, Fc-γ RIIB/CD32b, TREM-1, Fc-γ RIIC/CD32c, TREM-2, Fc-γ RIIA/CD32a, TREM-3, Fc-γ RIII/CD16, TREML1/TLT-1, ICAM-2/CD102, or Vanilloid R1; and (ii) a targeting moiety is directed against a tumor cell, along with the human IFNγ or human TNFα signaling agents described herein.

[0614] In one embodiment, the present Fc-based chimeric protein complex has (i) a targeting moiety directed against a dendritic cell, for example, mediated by targeting to CLEC-9A, DC-SIGN, CD64, CLEC4A, or DEC205 and (ii) a targeting moiety is directed against a tumor cell, along with the human IFNγ or human TNFα signaling agents described herein. In an embodiment, the present Fc-based chimeric protein complex has a targeting moiety directed against CLEC9A on dendritic cells and a second targeting moiety directed against PD-L1 or PD-L2 on tumor cells.

[0615] In one embodiment, the present Fc-based chimeric protein complex has (i) a targeting moiety directed against a dendritic cell, for example, mediated by targeting to CLEC9A and (ii) a targeting moiety is directed against a tumor cell, along with the human IFNγ or human TNFα signaling agents described herein. In an embodiment, the present Fc-based chimeric protein complex has a targeting moiety directed against CLEC9A on dendritic cells and a second targeting moiety directed against PD-L1 or PD-L2 on tumor cells.

[0616] In one embodiment, the present Fc-based chimeric protein complex has (i) a targeting moiety directed against a dendritic cell, for example, mediated by targeting to XCR1 and (ii) a targeting moiety is directed against a tumor cell, along with the human IFNγ or human TNFα signaling agents described herein. In an embodiment, the present Fc-based chimeric protein complex has a targeting moiety directed against XCR1 on dendritic cells and a second targeting moiety directed against PD-L1 or PD-L2 on tumor cells.

[0617] In one embodiment, the present Fc-based chimeric protein complex has (i) a targeting moiety directed against a dendritic cell, for example, mediated by targeting to RANK and (ii) a targeting moiety is directed against a tumor cell, along with the human IFNγ or human TNFα signaling agents described herein. In an embodiment, the present Fc-based chimeric protein complex has a targeting moiety directed against RANK on dendritic cells and a second targeting moiety directed against PD-L1 or PD-L2 on tumor cells.

[0618] By way of non-limiting example, in various embodiments, the present Fc-based chimeric protein complex has (i) a targeting moiety directed against a monocyte/macrophage, for example, mediated by targeting to SIRP1α, B7-1/CD80, ILT4/CD85d, B7-H1, ILT5/CD85a, Common β Chain, Integrin α 4/CD49d, BLAME/SLAMF8, Integrin α X/CDIIc, CCL6/C10, Integrin β 2/CD18, CD155/PVR, Integrin β 3/CD61, CD31/PECAM-1, Latexin, CD36/SR-B3, Leukotriene B4 R1, CD40/TNFRSF5, LIMPIIISR-B2, CD43, LMIR1/CD300A, CD45, LMIR2/CD300c, CD68, LMIR3/CD300LF, CD84/SLAMF5, LMIR5/CD300LB, CD97, LMIR6/CD300LE, CD163, LRP-1, CD2F-10/SLAMF9, MARCO, CRACC/SLAMF7, MD-1, ECF-L, MD-2, EMMPRIN/CD147, MGL2, Endoglin/CD105, Osteoactivin/GPNMB, Fc-γ RI/CD64, Osteopontin, Fc-γ RIIB/CD32b, PD-L2, Fc-γ RIIC/CD32c, Siglec-3/CD33, Fc-γ RIIA/CD32a, SIGNR1/CD209, Fc-γ RIII/CD16, SLAM, GM-CSF R α, TCCR/WSX-1, ICAM-2/CD102, TLR3, IFN-γ RI, TLR4, IFN-γ R2, TREM-1, IL-I RII, TREM-2, ILT2/CD85j, TREM-3, ILT3/CD85k, TREML1/TLT-1, 2B4/SLAMF 4, IL-10 R α, ALCAM, IL-10 R β, AminopeptidaseN/ANPEP, ILT2/CD85j, Common β Chain, ILT3/CD85k, C1q R1/CD93, ILT4/CD85d, CCR1, ILT5/CD85a, CCR2, CD206, Integrin α 4/CD49d, CCR5, Integrin α M/CDII b, CCR8, Integrin α X/CDIIc, CD155/PVR, Integrin β 2/CD18, CD14, Integrin β 3/CD61, CD36/SR-B3, LAIR1, CD43, LAIR2, CD45, Leukotriene B4-R1, CD68, LIMPIIISR-B2, CD84/SLAMF5, LMIR1/CD300A, CD97, LMIR2/CD300c, CD163, LMIR3/CD300LF, Coagulation Factor Ill/Tissue Factor, LMIR5/CD300LB, CX3CR1, CX3CL1, LMIR6/CD300LE, CXCR4, LRP-1, CXCR6, M-CSF R, DEP-1/CD148, MD-1, DNAM-1, MD-2, EMMPRIN/CD147, MMR, Endoglin/CD105, NCAM-L1, Fc-γ RI/CD64, PSGL-1, Fc-γ RIIIICD16, RP105, G-CSF R, L-Selectin, GM-CSF R α, Siglec-3/CD33, HVEM/TNFRSF14, SLAM, ICAM-1/CD54, TCCR/WSX-1, ICAM-2/CD102, TREM-1, IL-6 R, TREM-2, CXCRI/IL-8 RA, TREM-3, or TREMLI/TLT-1; and (ii) a targeting moiety is directed against a tumor cell, along with the human IFNγ or human TNFα signaling agents described herein.

[0619] In one embodiment, the present Fc-based chimeric protein complex has (i) a targeting moiety directed against a monocyte/macrophage, for example, mediated by targeting to B7-H1, CD31/PECAM-1, CD163, CCR2, or Macrophage Mannose Receptor CD206 and (ii) a targeting moiety is directed against a tumor cell, along with the human IFNγ or human TNFα signaling agents described herein.

[0620] In one embodiment, the present Fc-based chimeric protein complex has (i) a targeting moiety directed against a monocyte/macrophage, for example, mediated by targeting to SIRP1α and (ii) a targeting moiety is directed against a tumor cell, along with the human IFNγ or human TNFα signaling agents described herein. In an embodiment, the present Fc-based chimeric protein complex has a targeting moiety directed against SIRP1α on macrophage cells and a second targeting moiety directed against PD-L1 or PD-L2 on tumor cells.

[0621] In various embodiments, the present Fc-based chimeric protein complex has one or more targeting moieties directed against a checkpoint marker, e.g. one or more of PD-1/PD-L1 or PD-L2, CD28/CD80 or CD86, CTLA4/CD80 or CD86, ICOS/ICOSL or B7RP1, BTLA/HVEM, KIR, LAG3, CD137/CD137L, OX40/OX40L, CD27, CD40L, TIM3/Gal9, and A2aR. In one embodiment, the present Fc-based chimeric protein complex has (i) a targeting moiety directed against a checkpoint marker on a T cell, for example, PD-1 and (ii) a targeting moiety directed against a tumor cell, for example, PD-L1 or PD-L2, along with the human IFNγ or human TNFα signaling agents described herein. In an embodiment, the present Fc-based chimeric protein complex has a targeting moiety directed against PD-1 on T cells and a second targeting moiety directed against PD-L1 on tumor cells. In another embodiment, the present Fc-based chimeric protein complex has a targeting moiety directed against PD-1 on T cells and a second targeting moiety directed against PD-L2 on tumor cells.

[0622] In some embodiments, the present Fc-based chimeric protein complex comprises two or more targeting moieties directed to the same or different immune cells. In some embodiments, the present Fc-based chimeric protein complex has (i) one or more targeting moieties directed against an immune cell selected from a T cell, a B cell, a dendritic cell, a macrophage, a NK cell, or subsets thereof and (ii) one or more targeting moieties directed against either the same or another immune cell selected from a T cell, a B cell, a dendritic cell, a macrophage, a NK cell, or subsets thereof, along with the human IFNγ or human TNFα signaling agents described herein.

[0623] In one embodiment, the present Fc-based chimeric protein complex comprises one or more targeting moieties directed against a T cell and one or more targeting moieties directed against the same or another T cell. In one embodiment, the present Fc-based chimeric protein complex comprises one or more targeting moieties directed against a T cell and one or more targeting moieties directed against a B cell. In one embodiment, the present Fc-based chimeric protein complex comprises one or more targeting moieties directed against a T cell and one or more targeting moieties directed against a dendritic cell. In one embodiment, the present Fc-based chimeric protein complex comprises one or more targeting moieties against a T cell and one or more targeting moieties directed against a macrophage. In one embodiment, the present Fc-based chimeric protein complex comprises one or more targeting moieties against a T cell and one or more targeting moieties directed against a NK cell. For example, in an illustrative embodiment, the Fc-based chimeric protein complex may include a targeting moiety against CD8 and a targeting moiety against Clec9A. In another illustrative embodiment, the Fc-based chimeric protein complex may include a targeting moiety against CD8 and a targeting moiety against CD3. In another illustrative embodiment, the Fc-based chimeric protein complex may include a targeting moiety against CD8 and a targeting moiety against PD-1.

[0624] In one embodiment, the present Fc-based chimeric protein complex comprises one or more targeting moieties directed against a B cell and one or more targeting moieties directed against the same or another B cell. In one embodiment, the present Fc-based chimeric protein complex comprises one or more targeting moieties directed against a B cell and one or more targeting moieties directed against a T cell. In one embodiment, the present Fc-based chimeric protein complex comprises one or more targeting moieties directed against a B cell and one or more targeting moieties directed against a dendritic cell. In one embodiment, the present Fc-based chimeric protein complex comprises one or more targeting moieties against a B cell and one or more targeting moieties directed against a macrophage. In one embodiment, the present Fc-based chimeric protein complex comprises one or more targeting moieties against a B cell and one or more targeting moieties directed against a NK cell.

[0625] In one embodiment, the present Fc-based chimeric protein complex comprises one or more targeting moieties directed against a dendritic cell and one or more targeting moieties directed against the same or another dendritic cell. In one embodiment, the present Fc-based chimeric protein complex comprises one or more targeting moieties directed against a dendritic cell and one or more targeting moieties directed against a T cell. In one embodiment, the present Fc-based chimeric protein complex comprises one or more targeting moieties directed against a dendritic cell and one or more targeting moieties directed against a B cell. In one embodiment, the present Fc-based chimeric protein complex comprises one or more targeting moieties against a dendritic cell and one or more targeting moieties directed against a macrophage. In one embodiment, the present Fc-based chimeric protein complex comprises one or more targeting moieties against a dendritic cell and one or more targeting moieties directed against a NK cell.

[0626] In one embodiment, the present Fc-based chimeric protein complex comprises one or more targeting moieties directed against a macrophage and one or more targeting moieties directed against the same or another macrophage. In one embodiment, the present Fc-based chimeric protein complex comprises one or more targeting moieties directed against a macrophage and one or more targeting moieties directed against a T cell. In one embodiment, the present Fc-based chimeric protein complex comprises one or more targeting moieties directed against a macrophage and one or more targeting moieties directed against a B cell. In one embodiment, the present Fc-based chimeric protein complex comprises one or more targeting moieties against a macrophage and one or more targeting moieties directed against a dendritic cell. In one embodiment, the present Fc-based chimeric protein complex comprises one or more targeting moieties against a macrophage and one or more targeting moieties directed against a NK cell.

[0627] In one embodiment, the present Fc-based chimeric protein complex comprises one or more targeting moieties directed against an NK cell and one or more targeting moieties directed against the same or another NK cell. In one embodiment, the present Fc-based chimeric protein complex comprises one or more targeting moieties directed against an NK cell and one or more targeting moieties directed against a T cell. In one embodiment, the present Fc-based chimeric protein complex comprises one or more targeting moieties directed against an NK cell and one or more targeting moieties directed against a B cell. In one embodiment, the present Fc-based chimeric protein complex comprises one or more targeting moieties against an NK cell and one or more targeting moieties directed against a macrophage. In one embodiment, the present Fc-based chimeric protein complex comprises one or more targeting moieties against an NK cell and one or more targeting moieties directed against a dendritic cell.

[0628] In one embodiment, the present Fc-based chimeric protein complex comprises a targeting moiety directed against a tumor cell and a second targeting moiety directed against the same or a different tumor cell. In such embodiments, the targeting moieties may bind to any of the tumor antigens described herein.

[0629] In some embodiments, the Fc-based chimeric protein complex of the invention comprises one or more targeting moieties having recognition domains that bind to a target (e.g. antigen, receptor) of interest including those found on one or more cells selected from adipocytes (e.g., white fat cell, brown fat cell), liver lipocytes, hepatic cells, kidney cells (e.g., kidney parietal cell, kidney salivary gland, mammary gland, etc.), duct cells (of seminal vesicle, prostate gland, etc.), intestinal brush border cells (with microvilli), exocrine gland striated duct cells, gall bladder epithelial cells, ductulus efferens nonciliated cells, epididymal principal cells, epididymal basal cells, endothelial cells, ameloblast epithelial cells (tooth enamel secretion), planum semilunatum epithelial cells of vestibular system of ear (proteoglycan secretion), organ of Corti interdental epithelial cells (secreting tectorial membrane covering hair cells), loose connective tissue fibroblasts, corneal fibroblasts (corneal keratocytes), tendon fibroblasts, bone marrow reticular tissue fibroblasts, nonepithelial fibroblasts, pericytes, nucleus pulposus cells of intervertebral disc, cementoblasts/cementocytes (tooth root bonelike ewan cell secretion), odontoblasts/odontocytes (tooth dentin secretion), hyaline cartilage chondrocytes, fibrocartilage chondrocytes, elastic cartilage chondrocytes, osteoblasts/osteocytes, osteoprogenitor cells (stem cell of osteoblasts), hyalocytes of vitreous body of eye, stellate cells of perilymphatic space of ear, hepatic stellate cells (Ito cell), pancreatic stelle cells, skeletal muscle cells, satellite cells, heart muscle cells, smooth muscle cells, myoepithelial cells of iris, myoepithelial cells of exocrine glands, exocrine secretory epithelial cells (e.g., salivary gland cells, mammary gland cells, lacrimal gland cells, sweat gland cells, sebaceious gland cells, prostate gland cells, gastric glad cells, pancreatic acinar cells, pneumocytes), a hormone secreting cells (e.g., pituitary cells, neurosecretory cells, gut and respiratory tract cells, thyroid gland cells, parathyroid glad cells, adrenal gland cells, Leydig cells of testes, pancreatic islet cells), keratinizing epithelial cells, wet stratified barrier epithelial cells, neuronal cells (e.g., sensory transducer cells, autonomic neuron cells, sense organ and peripheral neuron supporting cells, and central nervous system neurons and glial cells such as interneurons, principal cells, astrocytes, oligodendrocytes, and ependymal cells).

### Fc-Based Chimeric Protein Complexes

[0630] In embodiments, the Fc-based chimeric protein complexes of the present technology comprise at least one Fc domain disclosed herein, at least one human IFNγ or human TNFα signaling agent (SA) disclosed herein, and at least one targeting moiety (TM) disclosed herein.

[0631] It is understood that, the present Fc-based chimeric protein complexes may encompass a complex of two fusion proteins. In some embodiments, the Fc-based chimeric protein complex comprises one or more fusion proteins.

[0632] In some embodiments, the Fc-based chimeric protein complex is heterodimeric. In some embodiments, the heterodimeric Fc-based chimeric protein complex has a trans orientation/configuration. In some embodiments, the heterodimeric Fc-based chimeric protein complex has a cis orientation/configuration. In some embodiments, the heterodimeric Fc-based chimeric protein complex does not comprise the human IFNγ or human TNFα signaling agent and targeting moiety on a single polypeptide. In some embodiments, the human IFNγ or human TNFα signaling agent and targeting moiety are on the same end (N-terminus or C-terminus) of the Fc domain or the Fc chains thereof. In some embodiments, the human IFNγ or human TNFα signaling agent and targeting moiety are on different ends (N-terminus or C-terminus) of the Fc domain or the Fc chains thereof. In some embodiments, the human IFNγ or human TNFα signaling agent is wild type or modified.

[0633] In some embodiments, the Fc-based chimeric protein has an improved in vivo half-life relative to a chimeric protein lacking an Fc or a chimeric protein which is not a heterodimeric complex. In some embodiments, the Fc-based chimeric protein has an improved solubility, stability and other pharmacological properties relative to a chimeric protein lacking an Fc or a chimeric protein which is not a heterodimeric complex.

[0634] Heterodimeric Fc-based chimeric protein complexes are composed of two different polypeptides. In embodiments described herein, the targeting domain is on a different polypeptide than the human IFNγ or human TNFα signaling agent and accordingly, proteins that contain only one targeting domain copy, and also only one human IFNγ or human TNFα signaling agent copy can be made (this provides a configuration in which potential interference with desired properties can be controlled). Further, in embodiments, one targeting domain (e.g. VHH) only can avoid cross-linking of the antigen on the cell surface (which could elicit undesired effects in some cases) Further, in embodiments, one human IFNγ or human TNFα signaling agent may alleviate molecular “crowding” and potential interference with avidity mediated restoration of effector function in dependence of the targeting domain. Further, in embodiments, heterodimeric Fc-based chimeric protein complexes can have two targeting moieties and these can be placed on the two different polypeptides. For instance, in embodiments, the C-terminus of both targeting moieties (e.g. VHHs) can be masked to avoid potential autoantibodies or pre-existing antibodies (e.g. VHH autoantibodies or pre-existing antibodies). Further, in embodiments, heterodimeric Fc-based chimeric protein complexes, e.g. with the targeting domain on a different polypeptide than the human IFNγ or human TNFα signaling agent (e.g. wild type human IFNγ or human TNFα signaling agent), may favor “cross-linking” of two cell types (e.g. a tumor cell and an immune cell). Further, in embodiments, heterodimeric Fc-based chimeric protein complexes can have two human IFNγ or human TNFα signaling agents, each on different polypeptides to allow more complex effector responses (e.g. with any two of the human IFNγ or human TNFα signaling agents described herein).

[0635] Further, in embodiments, heterodimeric Fc-based chimeric protein complexes, e.g. with the targeting domain on a different polypeptide than the human IFNγ or human TNFα signaling agent, combinatorial diversity of targeting moiety and human IFNγ or human TNFα signaling agent is provided in a practical manner. For instance, in embodiments, polypeptides with any of the targeting moieties described herein can be combined “off the shelf” with polypeptides with the human IFNγ or human TNFα signaling agents described herein to allow rapid generation of various combinations of targeting moieties and human IFNγ or human TNFα signaling agents in single Fc-based chimeric protein complexes.

[0636] In some embodiments, the Fc-based chimeric protein complexes described herein comprise one or more linkers. In some embodiments, the Fc-based chimeric protein complex includes a linker that connects the Fc domain, human IFNγ or human TNFα signaling agent(s) and targeting moiety(ies). In some embodiments, the Fc-based chimeric protein complex includes a linker that connects each human IFNγ or human TNFα signaling agent and targeting moiety (or, if more than one targeting moiety, a signaling agent to one of the targeting moieties). In some embodiments, the Fc-based chimeric protein complex includes a linker that connects each human IFNγ or human TNFα signaling agent to the Fc domain. In some embodiments, the Fc-based chimeric protein complex includes a linker that connects each targeting moiety to the Fc domain. In some embodiments, the Fc-based chimeric protein complex includes a linker that connects a targeting moiety to another targeting moiety. In some embodiments, the Fc-based chimeric protein complex includes a linker that connects a human IFNγ or human TNFα signaling agent to another human IFNγ or human TNFα signaling agent.

[0637] In some embodiments, the Fc-based chimeric protein complexes of the present invention include at least one linker that connects at least one human IFNγ or human TNFα signaling agent monomer or at least one targeting agent monomer to the Fc chain. In some embodiments, the present invention includes at least one linker that connects one human IFNγ or human TNFα signaling agent monomer to another human IFNγ or human TNFα signaling agent monomer or at least one linker that connects one targeting moiety monomer to another targeting moiety monomer. In other embodiments, the Fc-based chimeric protein complex includes at least one linker that connects at least one human IFNγ or human TNFα signaling agent monomer to the targeting moiety. In some embodiments, the linker connects at least one targeting moiety monomer to at least one human IFNγ or human TNFα signaling agent or a monomer thereof. In some embodiments, the Fc-based chimeric protein complex includes a first linker that connects at least one human IFNγ or human TNFα signaling agent monomer to a first Fc chain and a second linker connects at least one human IFNγ or human TNFα signaling agent monomer to a second Fc chain. In some embodiments, the Fc-based chimeric protein complex includes a first linker that connects at least one targeting moiety monomer to a first Fc chain and a second linker connects at least one targeting moiety monomer to a second Fc chain.

[0638] In some embodiments, an Fc-based chimeric protein complex comprises two or more targeting moieties. In such embodiments, the targeting moieties can be the same targeting moiety or they can be different targeting moieties.

[0639] In some embodiments, an Fc-based chimeric protein complex comprises two or more human IFNγ or human TNFα signaling agents. In such embodiments, the human IFNγ or human TNFα signaling agents can be the same targeting moiety or they can be different targeting moieties.

[0640] By way of example, in some embodiments, the Fc-based chimeric protein complex comprise an Fc domain, at least two human IFNγ or human TNFα signaling agents (SA), and at least two targeting moieties (TM), wherein the Fc domain and targeting moieties are selected from any of the Fc domains and targeting moieties disclosed herein. In some embodiments, the Fc domain is homodimeric.

[0641] In various embodiments, the Fc-based chimeric protein complex takes the form of any of the schematics of FIG. 3A-J, 4A-J, 5, 6A-F, or 7A-F.

[0642] In various embodiments, the Fc-based chimeric protein complex takes the form of any of the schematics of FIGS. 3A-J. In various embodiments, the Fc-based chimeric protein complex takes the form of any of the schematics of FIGS. 4A-J.

[0643] In various embodiments, the Fc-based chimeric protein complex takes the form of any of the schematics of FIG. 5.

[0644] In various embodiments, the Fc-based chimeric protein complex takes the form of any of the schematics of FIGS. 6A-F.

[0645] In various embodiments, the Fc-based chimeric protein complex takes the form of any of the schematics of FIGS. 7A-F.

[0646] In some embodiments, the two monomers of a dimeric human IFNγ or human TNFα signaling agents are linked to two Fc chains and the targeting moiety is attached to one Fc chain (FIGS. 3A, 3D, 4A and 4D). In some embodiments, one monomer of the dimeric human IFNγ or human TNFα signaling agent is attached to the targeting moiety and the targeting moiety is attached to a first Fc chain and the second monomer of the human IFNγ or human TNFα signaling agent is attached directly to the second Fc chain (FIGS. 3B, 3E, 4B and 4E). In some embodiments, first monomer of the dimeric human IFNγ or human TNFα signaling agent is attached directly to the first Fc chain, the targeting moiety is attached to the first monomer of the signaling moiety and the second monomer of the human IFNγ or human TNFα signaling agent is attached directly to the second Fc chain (FIGS. 3C, 3F, 4C and 4F). In some embodiments, the monomers of dimeric human IFNγ or human TNFα signaling agent are attached to the same side of the Fc domain as the targeting moiety. For example, in FIGS. 3G-J and 4G-J, the human IFNγ or human TNFα signaling agent or monomers thereof are attached to the same side of the Fc domain as the targeting moiety.

[0647] In some embodiments, three monomers of a trimeric human IFNγ or human TNFα signaling agents are linked to two Fc chains and the targeting moiety is attached to one Fc chain (e.g., FIGS. 6A and 7A). In FIGS. 6A and 7A, the two monomers of the human IFNγ or human TNFα signaling agent are attached to each other and to a first Fc chain, one monomer of the human IFNγ or human TNFα signaling agent is attached to the second Fc chain, and the targeting moiety is attached to one of the Fc chains. In some embodiments, one monomer of the trimeric human IFNγ or human TNFα signaling agent is attached to a first Fc chain and two monomers of the human IFNγ or human TNFα signaling agent are attached to the second Fc chain as shown in FIGS. 6B, 6D, 7B and 7D. In FIGS. 6B, 6D, 7B, and 7D, the targeting moiety is attached to one Fc chain and to one monomer of the human IFNγ or human TNFα signaling agent. In FIGS. 6C and 7C, the targeting moiety is attached to two monomers of the human IFNγ or human TNFα signaling agent. In some embodiments, the targeting moiety is attached to one monomer of the human IFNγ or human TNFα signaling agent that is attached to a first Fc chain and the two monomers of the human IFNγ or human TNFα signaling agent are attached to one another and to the second Fc chain (FIGS. 6E and 7E). In some embodiments, two monomers of the trimeric human IFNγ or human TNFα signaling agent are attached to each other and one of those monomers is attached to a first Fc chain and one monomer of the human IFNγ or human TNFα signaling agent is attached to the second Fc chain (FIGS. 6F and 7F).

[0648] In some embodiments, the Fc domain is homodimeric or heterodimeric. In some embodiments, the Fc domain is attached to one or more monomers of the same human IFNγ or human TNFα signaling agent or to multiple monomers of two or more human IFNγ or human TNFα signaling agents. In other embodiments, the Fc domain in attached to one or more monomers of the same targeting moiety or to multiple monomers of two or more targeting moieties.

[0649] By way of example, in some embodiments, the Fc-based chimeric protein complex comprise an Fc domain, wherein the Fc domain comprises ionic pairing mutation(s) and/or knob-in-hole mutation(s), at least one human IFNγ or human TNFα signaling agent, and at least one targeting moiety, wherein the ionic pairing motif and/or a knob-in-hole motif, human IFNγ or human TNFα signaling agent, and targeting moiety are selected from any of the ionic pairing motif and/or a knob-in-hole motif, human IFNγ or human TNFα signaling agents, and targeting moieties disclosed herein. In some embodiments, the Fc domain is heterodimeric. In some embodiments, the Fc domain comprises a mutation that reduces or eliminates its effector function.

[0650] In some embodiments, a targeting moiety or human IFNγ or human TNFα signaling agent is linked to the Fc domain, comprising one or both of C_{H}2 and C_{H}3 domains, and optionally a hinge region. For example, vectors encoding the targeting moiety, human IFNγ or human TNFα signaling agent, or combination thereof, linked as a single nucleotide sequence to an Fc domain can be used to prepare such polypeptides.

[0651] In some embodiments, the linker may be utilized to link various functional groups, residues, or moieties as described herein to the Fc-based chimeric protein complex. In some embodiments, the linker is a single amino acid or a plurality of amino acids that does not affect or reduce the stability, orientation, binding, neutralization, and/or clearance characteristics of the binding regions and the binding protein. In various embodiments, the linker is selected from a peptide, a protein, a sugar, or a nucleic acid.

[0652] In some embodiments, the Fc-based chimeric protein complex comprises a linker connecting a targeting moiety and the human IFNγ or human TNFα signaling agent. In some embodiments, the Fc-based chimeric protein complex comprises a linker within the human IFNγ or human TNFα signaling agent (e.g. in the case of single chain TNFα, which can comprise two linkers to yield a trimer or in the case of IFN-γ, which can comprise a linkers to yield a dimer).

[0653] The present technology contemplates the use of a variety of linker sequences. In various embodiments, the linker may be derived from naturally-occurring multi-domain proteins or are empirical linkers as described, for example, in Chichili et al., (2013), Protein Sci. 22(2):153-167, Chen et al., (2013), Adv Drug Deliv Rev. 65(10):1357-1369, the entire contents of which are hereby incorporated by reference. In some embodiments, the linker may be designed using linker designing databases and computer programs such as those described in Chen et al., (2013), Adv Drug Deliv Rev. 65(10):1357-1369 and Crasto et al., (2000), Protein Eng. 13(5):309-312, the entire contents of which are hereby incorporated by reference. In various embodiments, the linker may be functional. For example, without limitation, the linker may function to improve the folding and/or stability, improve the expression, improve the pharmacokinetics, and/or improve the bioactivity of the Fc-based chimeric protein complex

[0654] In some embodiments, the linker is a polypeptide. In some embodiments, the linker is less than about 100 amino acids long. For example, the linker may be less than about 100, about 95, about 90, about 85, about 80, about 75, about 70, about 65, about 60, about 55, about 50, about 45, about 40, about 35, about 30, about 25, about 20, about 19, about 18, about 17, about 16, about 15, about 14, about 13, about 12, about 11, about 10, about 9, about 8, about 7, about 6, about 5, about 4, about 3, or about 2 amino acids long. In some embodiments, the linker is a polypeptide. In some embodiments, the linker is greater than about 100 amino acids long. For example, the linker may be greater than about 100, about 95, about 90, about 85, about 80, about 75, about 70, about 65, about 60, about 55, about 50, about 45, about 40, about 35, about 30, about 25, about 20, about 19, about 18, about 17, about 16, about 15, about 14, about 13, about 12, about 11, about 10, about 9, about 8, about 7, about 6, about 5, about 4, about 3, or about 2 amino acids long. In some embodiments, the linker is flexible. In another embodiment, the linker is rigid.

[0655] In some embodiments, the linker length allows for efficient binding of a targeting moiety, a human IFNγ or human TNFα signaling agent, and/or an Fc domain to their targets (e.g., receptors). For instance, in some embodiments, the linker length allows for efficient binding of one of the targeting moieties and the human IFNγ or human TNFα signaling agent to receptors on the same cell as well as the efficient binding of the other targeting moiety to another cell. Illustrative pairs of cells are provided elsewhere herein.

[0656] In some embodiments the linker length is at least equal to the minimum distance between the binding sites of a targeting moiety, a human IFNγ or human TNFα signaling agent, and/or an Fc domain targets (e.g., receptors) on the same cell. In some embodiments the linker length is at least twice, or three times, or four times, or five times, or ten times, or twenty times, or 25 times, or 50 times, or one hundred times, or more the minimum distance between the binding sites of a targeting moiety, a human IFNγ or human TNFα signaling agent, and/or an Fc domain targets on the same cell.

[0657] In some embodiments, a linker connects the two targeting moieties to each other and this linker has a short length and a linker connects a targeting moiety and a human IFNγ or human TNFα signaling agent this linker is longer than the linker connecting the two targeting moieties. For example, the difference in amino acid length between the linker connecting the two targeting moieties and the linker connecting a targeting moiety and a human IFNγ or human TNFα signaling agent may be about 100, about 95, about 90, about 85, about 80, about 75, about 70, about 65, about 60, about 55, about 50, about 45, about 40, about 35, about 30, about 25, about 20, about 19, about 18, about 17, about 16, about 15, about 14, about 13, about 12, about 11, about 10, about 9, about 8, about 7, about 6, about 5, about 4, about 3, or about 2 amino acids. In some embodiments, the linker is flexible. In another embodiment, the linker is rigid.

[0658] In various embodiments, the linker is substantially comprised of glycine and serine residues (e.g. about 30%, or about 40%, or about 50%, or about 60%, or about 70%, or about 80%, or about 90%, or about 95%, or about 97% glycines and serines). For example, in some embodiments, the linker is (Gly₄Ser)ₙ, where n is from about 1 to about 8, e.g. 1, 2, 3, 4, 5, 6, 7, or 8 (SEQ ID NO: 1283-SEQ ID NO: 1290, respectively). In an embodiment, the linker sequence is GGSGGSGGGGSGGGGS (SEQ ID NO: 1291). Additional illustrative linkers include, but are not limited to, linkers having the sequence LE, GGGGS (SEQ ID NO: 1283), (GGGGS)ₙ (n=1-7) (SEQ ID NO: 1283-SEQ ID NO: 1289), (Gly)₈ (SEQ ID NO: 1292), (Gly)₆ (SEQ ID NO: 1293), (EAAAK)ₙ (n=1-3) (SEQ ID NO: 1294-SEQ ID NO: 1296), A(EAAAK)ₙA (n=2-5) (SEQ ID NO: 1297-SEQ ID NO: 1300), AEAAAKEAAAKA (SEQ ID NO: 1297), A(EAAAK)₄ALEA(EAAAK)₄A (SEQ ID NO: 1301), PAPAP (SEQ ID NO: 1302), KESGSVSSEQLAQFRSLD (SEQ ID NO: 1303), EGKSSGSGSESKST (SEQ ID NO: 1304), GSAGSAAGSGEF (SEQ ID NO: 1305), and (XP)ₙ, with X designating any amino acid, e.g., Ala, Lys, or Glu. In various embodiments, the linker is GGS or (GGS)ₙ (n=2-20) (SEQ ID NO: 1306-SEQ ID NO: 1324). In some embodiments, the linker is G. In some embodiments, the linker is AAA. In some embodiments, the linker is (GGGGS)ₙ (n=9-20) (SEQ ID NO: 1325-SEQ ID NO: 1336).

[0659] In some embodiments, the linker is one or more of GGGSE (SEQ ID NO: 1337), GSESG (SEQ ID NO: 1338), GSEGS (SEQ ID NO: 1339), GEGGSGEGSSGEGSSSEGGGSEGGGSEGGGSEGGS (SEQ ID NO: 1340), and a linker of randomly placed G, S, and E every 4 amino acid intervals.

[0660] In some embodiments, the linker is a hinge region of an antibody (e.g., of IgG, IgA, IgD, and IgE, inclusive of subclasses (e.g. IgG1, IgG2, IgG3, and IgG4, and IgA1 and IgA2)). In various embodiments, the linker is a hinge region of an antibody (e.g., of IgG, IgA, IgD, and IgE, inclusive of subclasses (e.g. IgG1, IgG2, IgG3, and IgG4, and IgA1 and IgA2)). The hinge region, found in IgG, IgA, IgD, and IgE class antibodies, acts as a flexible spacer, allowing the Fab portion to move freely in space. In contrast to the constant regions, the hinge domains are structurally diverse, varying in both sequence and length among immunoglobulin classes and subclasses. For example, the length and flexibility of the hinge region varies among the IgG subclasses. The hinge region of IgG1 encompasses amino acids 216-231 and, because it is freely flexible, the Fab fragments can rotate about their axes of symmetry and move within a sphere centered at the first of two inter-heavy chain disulfide bridges. IgG2 has a shorter hinge than IgG1, with 12 amino acid residues and four disulfide bridges. The hinge region of IgG2 lacks a glycine residue, is relatively short, and contains a rigid poly-proline double helix, stabilized by extra inter-heavy chain disulfide bridges. These properties restrict the flexibility of the IgG2 molecule. IgG3 differs from the other subclasses by its unique extended hinge region (about four times as long as the IgG1 hinge), containing 62 amino acids (including 21 prolines and 11 cysteines), forming an inflexible poly-proline double helix. In IgG3, the Fab fragments are relatively far away from the Fc fragment, giving the molecule a greater flexibility. The elongated hinge in IgG3 is also responsible for its higher molecular weight compared to the other subclasses. The hinge region of IgG4 is shorter than that of IgG1 and its flexibility is intermediate between that of IgG1 and IgG2. The flexibility of the hinge regions reportedly decreases in the order IgG3>IgG1>IgG4>IgG2.

[0661] According to crystallographic studies, the immunoglobulin hinge region can be further subdivided functionally into three regions: the upper hinge region, the core region, and the lower hinge region. See Shin et al., 1992 Immunological Reviews 130:87. The upper hinge region includes amino acids from the carboxyl end of C_{H1} to the first residue in the hinge that restricts motion, generally the first cysteine residue that forms an interchain disulfide bond between the two heavy chains. The length of the upper hinge region correlates with the segmental flexibility of the antibody. The core hinge region contains the inter-heavy chain disulfide bridges, and the lower hinge region joins the amino terminal end of the C_{H2} domain and includes residues in C_{H2}. Id. The core hinge region of wild-type human IgG1 contains the sequence Cys-Pro-Pro-Cys (SEQ ID NO: 1341), which when dimerized by disulfide bond formation, results in a cyclic octapeptide believed to act as a pivot, thus conferring flexibility. In various embodiments, the linker comprises, one, or two, or three of the upper hinge region, the core region, and the lower hinge region of any antibody (e.g., of IgG, IgA, IgD, and IgE, inclusive of subclasses (e.g. IgG1, IgG2, IgG3, and IgG4, and IgA1 and IgA2)). The hinge region may also contain one or more glycosylation sites, which include a number of structurally distinct types of sites for carbohydrate attachment. For example, IgA1 contains five glycosylation sites within a 17-amino-acid segment of the hinge region, conferring resistance of the hinge region polypeptide to intestinal proteases, considered an advantageous property for a secretory immunoglobulin. In various embodiments, the linker of the present invention comprises one or more glycosylation sites. In various embodiments, the linker is a hinge-CH2-CH3 domain of a human IgG4 antibody.

[0662] In some embodiments, the linker is a synthetic linker such as PEG.

[0663] In various embodiments, the linker may be functional. For example, without limitation, the linker may function to improve the folding and/or stability, improve the expression, improve the pharmacokinetics, and/or improve the bioactivity of the Fc-based chimeric protein complex. In another example, the linker may function to target the Fc-based chimeric protein complex to a particular cell type or location.

### Functional Groups

[0664] In some embodiments, the Fc-based chimeric protein complex of the present technology includes one or more functional groups, residues, or moieties. In various embodiments, the one or more functional groups, residues, or moieties are attached or genetically fused to any of the Fc-proteins, the human IFNγ or human TNFα signaling agents, and the targeting moieties described herein. In some embodiments, such functional groups, residues or moieties confer one or more desired properties or functionalities to the Fc-based chimeric protein complex of the present technology. Examples of such functional groups and of techniques for introducing them into the Fc-based chimeric protein complex are known in the art, for example, see Remington's Pharmaceutical Sciences, 16th ed., Mack Publishing Co., Easton, Pa. (1980).

[0665] In various embodiments, the Fc-based chimeric protein complex may by conjugated and/or fused with another agent to extend half-life or otherwise improve pharmacodynamic and pharmacokinetic properties. For example, in some embodiments, the Fc-based chimeric protein complex may be fused or conjugated with one or more of PEG, XTEN (e.g., as rPEG), polysialic acid (POLYXEN), albumin (e.g., human serum albumin or HSA), elastin-like protein (ELP), PAS, HAP, GLK, CTP, transferrin, and the like.

[0666] In some embodiments, the functional groups, residues, or moieties comprise a suitable pharmacologically acceptable polymer, such as poly(ethyleneglycol) (PEG) or derivatives thereof (such as methoxypoly(ethyleneglycol) or mPEG). In some embodiments, attachment of the PEG moiety increases the half-life and/or reduces the immunogenecity of the Fc-based chimeric protein complex. Generally, any suitable form of pegylation can be used, such as the pegylation used in the art for antibodies and antibody fragments (including but not limited to single domain antibodies such as VHHs); see, for example, Chapman, Nat. Biotechnol., 54, 531-545 (2002); by Veronese and Harris, Adv. Drug Deliv. Rev. 54, 453-456 (2003), by Harris and Chess, Nat. Rev. Drug. Discov., 2, (2003) and in WO04060965, the entire contents of which are hereby incorporated by reference. Various reagents for pegylation of proteins are also commercially available, for example, from Nektar Therapeutics, USA. In some embodiments, site-directed pegylation is used, in particular via a cysteine-residue (see, for example, Yang et al., Protein Engineering, 16, 10, 761-770 (2003), the entire contents of which is hereby incorporated by reference). For example, for this purpose, PEG may be attached to a cysteine residue that naturally occurs in the Fc-based chimeric protein complex. In some embodiments, the Fc-based chimeric protein complex is modified so as to suitably introduce one or more cysteine residues for attachment of PEG, or an amino acid sequence comprising one or more cysteine residues for attachment of PEG may be fused to the amino- and/or carboxy-terminus of the Fc-based chimeric protein complex, using techniques known in the art.

[0667] In some embodiments, the functional groups, residues, or moieties comprise N-linked or O-linked glycosylation. In some embodiments, the N-linked or O-linked glycosylation is introduced as part of a co-translational and/or post-translational modification.

[0668] In some embodiments, the functional groups, residues, or moieties comprise one or more detectable labels or other signal-generating groups or moieties. Suitable labels and techniques for attaching, using and detecting them are known in the art and, include, but are not limited to, fluorescent labels (such as fluorescein, isothiocyanate, rhodamine, phycoerythrin, phycocyanin, allophycocyanin, o-phthaldehyde, and fluorescamine and fluorescent metals such as Eu or others metals from the lanthanide series), phosphorescent labels, chemiluminescent labels or bioluminescent labels (such as luminal, isoluminol, theromatic acridinium ester, imidazole, acridinium salts, oxalate ester, dioxetane or GFP and its analogs), radio-isotopes, metals, metals chelates or metallic cations or other metals or metallic cations that are particularly suited for use in in vivo, in vitro or in situ diagnosis and imaging, as well as chromophores and enzymes (such as malate dehydrogenase, staphylococcal nuclease, delta-V-steroid isomerase, yeast alcohol dehydrogenase, alpha-glycerophosphate dehydrogenase, triose phosphate isomerase, biotinavidin peroxidase, horseradish peroxidase, alkaline phosphatase, asparaginase, glucose oxidase, beta-galactosidase, ribonuclease, urease, catalase, glucose-VI-phosphate dehydrogenase, glucoamylase and acetylcholine esterase). Other suitable labels include moieties that can be detected using NMR or ESR spectroscopy. Such labeled VHHs and polypeptides of the invention may, for example, be used for in vitro, in vivo or in situ assays (including immunoassays known per se such as ELISA, RIA, EIA and other “sandwich assays,” etc.) as well as in vivo diagnostic and imaging purposes, depending on the choice of the specific label.

[0669] In some embodiments, the functional groups, residues, or moieties comprise a tag that is attached or genetically fused to the Fc-based chimeric protein complex. In some embodiments, the Fc-based chimeric protein complex may include a single tag or multiple tags. The tag for example is a peptide, sugar, or DNA molecule that does not inhibit or prevent binding of the Fc-based chimeric protein complex to at target of interest or any other antigen of interest, such as, e.g., tumor antigens. In various embodiments, the tag is at least about: three to five amino acids long, five to eight amino acids long, eight to twelve amino acids long, twelve to fifteen amino acids long, or fifteen to twenty amino acids long. Illustrative tags are described for example, in U.S. Patent Publication No. US2013/0058962. In some embodiment, the tag is an affinity tag such as glutathione-S-transferase (GST) and histidine (His) tag. In an embodiment, the Fc-based chimeric protein complex comprises a His tag.

[0670] In some embodiments, the functional groups, residues, or moieties comprise a chelating group, for example, to chelate one of the metals or metallic cations. Suitable chelating groups, for example, include, without limitation, diethyl-enetriaminepentaacetic acid (DTPA) or ethylenediaminetetraacetic acid (EDTA).

[0671] In some embodiments, the functional groups, residues, or moieties comprise a functional group that is one part of a specific binding pair, such as the biotin-(strept)avidin binding pair. Such a functional group may be used to link the Fc-based chimeric protein complex to another protein, polypeptide or chemical compound that is bound to the other half of the binding pair, i.e., through formation of the binding pair. For example, an Fc-based chimeric protein complex may be conjugated to biotin, and linked to another protein, polypeptide, compound or carrier conjugated to avidin or streptavidin. For example, such a conjugated Fc-based chimeric protein complex may be used as a reporter, for example, in a diagnostic system where a detectable signal-producing agent is conjugated to avidin or streptavidin. Such binding pairs may, for example, also be used to bind the Fc-based chimeric protein complex to a carrier, including carriers suitable for pharmaceutical purposes. One non-limiting example are the liposomal formulations described by Cao and Suresh, Journal of Drug Targeting, 8, 4, 257 (2000). Such binding pairs may also be used to link a therapeutically active agent to the Fc-based chimeric protein complex.

### Modifications and Production of Fc-Based Chimeric Protein Complex

[0672] In various embodiments, the Fc-based chimeric protein complex comprises a targeting moiety that is a VHH. In various embodiments, the VHH is not limited to a specific biological source or to a specific method of preparation. For example, the VHH can generally be obtained: (1) by isolating the V_{H}H domain of a naturally occurring heavy chain antibody; (2) by expression of a nucleotide sequence encoding a naturally occurring V_{H}H domain; (3) by “humanization” of a naturally occurring V_{H}H domain or by expression of a nucleic acid encoding a such humanized V_{H}H domain; (4) by “camelization” of a naturally occurring VH domain from any animal species, such as from a mammalian species, such as from a human being, or by expression of a nucleic acid encoding such a camelized VH domain; (5) by “camelization” of a “domain antibody” or “Dab” as described in the art, or by expression of a nucleic acid encoding such a camelized VH domain; (6) by using synthetic or semi-synthetic techniques for preparing proteins, polypeptides or other amino acid sequences known in the art; (7) by preparing a nucleic acid encoding a VHH using techniques for nucleic acid synthesis known in the art, followed by expression of the nucleic acid thus obtained; and/or (8) by any combination of one or more of the foregoing.

[0673] In an embodiment, the Fc-based chimeric protein complex comprises a VHH that corresponds to the V_{H}H domains of naturally occurring heavy chain antibodies directed against a target of interest. In some embodiments, such V_{H}H sequences can generally be generated or obtained by suitably immunizing a species of Camelid with a molecule of based on the target of interest (e.g., XCR1, Clec9A, CD8, SIRP1α, FAP, etc.) (i.e., so as to raise an immune response and/or heavy chain antibodies directed against the target of interest), by obtaining a suitable biological sample from the Camelid (such as a blood sample, or any sample of B-cells), and by generating V_{H}H sequences directed against the target of interest, starting from the sample, using any suitable known techniques. In some embodiments, naturally occurring V_{H}H domains against the target of interest can be obtained from naive libraries of Camelid V_{H}H sequences, for example, by screening such a library using the target of interest or at least one part, fragment, antigenic determinant or epitope thereof using one or more screening techniques known in the art. Such libraries and techniques are, for example, described in WO9937681, WO0190190, WO03025020 and WO03035694, the entire contents of which are hereby incorporated by reference. In some embodiments, improved synthetic or semi-synthetic libraries derived from naive V_{H}H libraries may be used, such as V_{H}H libraries obtained from naive V_{H}H libraries by techniques such as random mutagenesis and/or CDR shuffling, as for example, described in WO0043507, the entire contents of which are hereby incorporated by reference. In some embodiments, another technique for obtaining V_{H}H sequences directed against a target of interest involves suitably immunizing a transgenic mammal that is capable of expressing heavy chain antibodies (i.e., so as to raise an immune response and/or heavy chain antibodies directed against the target of interest), obtaining a suitable biological sample from the transgenic mammal (such as a blood sample, or any sample of B-cells), and then generating V_{H}H sequences directed against XCR1 starting from the sample, using any suitable known techniques. For example, for this purpose, the heavy chain antibody-expressing mice and the further methods and techniques described in WO02085945 and in WO04049794 (the entire contents of which are hereby incorporated by reference) can be used.

[0674] In an embodiment, the Fc-based chimeric protein complex comprises a VHH that has been “humanized” i.e., by replacing one or more amino acid residues in the amino acid sequence of the naturally occurring V_{H}H sequence (and in particular in the framework sequences) by one or more of the amino acid residues that occur at the corresponding position(s) in a VH domain from a conventional 4-chain antibody from a human being. This can be performed using humanization techniques known in the art. In some embodiments, possible humanizing substitutions or combinations of humanizing substitutions may be determined by methods known in the art, for example, by a comparison between the sequence of a VHH and the sequence of a naturally occurring human VH domain. In some embodiments, the humanizing substitutions are chosen such that the resulting humanized VHHs still retain advantageous functional properties. Generally, as a result of humanization, the VHHs of the invention may become more “human-like,” while still retaining favorable properties such as a reduced immunogenicity, compared to the corresponding naturally occurring V_{H}H domains. In various embodiments, the humanized VHHs of the invention can be obtained in any suitable manner known in the art and thus are not strictly limited to polypeptides that have been obtained using a polypeptide that comprises a naturally occurring V_{H}H domain as a starting material.

[0675] In an embodiment, the Fc-based chimeric protein complex comprises a VHH that has been “camelized,” i.e., by replacing one or more amino acid residues in the amino acid sequence of a naturally occurring VH domain from a conventional 4-chain antibody by one or more of the amino acid residues that occur at the corresponding position(s) in a V_{H}H domain of a heavy chain antibody of a camelid. In some embodiments, such “camelizing” substitutions are inserted at amino acid positions that form and/or are present at the VH-VL interface, and/or at the so-called Camelidae hallmark residues (see, for example, WO9404678, the entire contents of which are hereby incorporated by reference). In some embodiments, the VH sequence that is used as a starting material or starting point for generating or designing the camelized VHH is a VH sequence from a mammal, for example, the VH sequence of a human being, such as a VH3 sequence. In various embodiments, the camelized VHHs can be obtained in any suitable manner known in the art (i.e., as indicated under points (1)-(8) above) and thus are not strictly limited to polypeptides that have been obtained using a polypeptide that comprises a naturally occurring VH domain as a starting material.

[0676] In various embodiments, both “humanization” and “camelization” can be performed by providing a nucleotide sequence that encodes a naturally occurring V_{H}H domain or VH domain, respectively, and then changing, in a manner known in the art, one or more codons in the nucleotide sequence in such a way that the new nucleotide sequence encodes a “humanized” or “camelized” VHH, respectively. This nucleic acid can then be expressed in a manner known in the art, so as to provide the desired VHH of the invention. Alternatively, based on the amino acid sequence of a naturally occurring V_{H}H domain or VH domain, respectively, the amino acid sequence of the desired humanized or camelized VHH of the invention, respectively, can be designed and then synthesized de novo using techniques for peptide synthesis known in the art. Also, based on the amino acid sequence or nucleotide sequence of a naturally occurring V_{H}H domain or VH domain, respectively, a nucleotide sequence encoding the desired humanized or camelized VHH, respectively, can be designed and then synthesized de novo using techniques for nucleic acid synthesis known in the art, after which the nucleic acid thus obtained can be expressed in a manner known in the art, so as to provide the desired VHH of the invention. Other suitable methods and techniques for obtaining the VHHs of the invention and/or nucleic acids encoding the same, starting from naturally occurring VH sequences or V_{H}H sequences, are known in the art, and may, for example, comprise combining one or more parts of one or more naturally occurring VH sequences (such as one or more FR sequences and/or CDR sequences), one or more parts of one or more naturally occurring V_{H}H sequences (such as one or more FR sequences or CDR sequences), and/or one or more synthetic or semi-synthetic sequences, in a suitable manner, so as to provide a VHH of the invention or a nucleotide sequence or nucleic acid encoding the same.

[0677] Methods for producing the Fc-based chimeric protein complex of the present technology are described herein. For example, DNA sequences encoding the Fc-based chimeric protein complex of the present technology can be chemically synthesized using methods known in the art. Synthetic DNA sequences can be ligated to other appropriate nucleotide sequences, including, e.g., expression control sequences, to produce gene expression constructs encoding the desired Fc-based chimeric protein complex of the present technology. Accordingly, in various embodiments, the present invention provides for isolated nucleic acids comprising a nucleotide sequence encoding the Fc-based chimeric protein complex of the present technology.

[0678] Nucleic acids encoding the Fc-based chimeric protein complex of the present technology can be incorporated (ligated) into expression vectors, which can be introduced into host cells through transfection, transformation, or transduction techniques. For example, nucleic acids encoding the Fc-based chimeric protein complex of the present technology invention can be introduced into host cells by retroviral transduction. Illustrative host cells are E. coli cells, Chinese hamster ovary (CHO) cells, human embryonic kidney 293 (HEK 293) cells, HeLa cells, baby hamster kidney (BHK) cells, monkey kidney cells (COS), human hepatocellular carcinoma cells (e.g., Hep G2), and myeloma cells. Transformed host cells can be grown under conditions that permit the host cells to express the genes that encode the Fc-based chimeric protein complex of the present technology. Accordingly, in various embodiments, the present invention provides expression vectors comprising nucleic acids that encode the Fc-based chimeric protein complex of the present technology. In various embodiments, the present invention additional provides host cells comprising such expression vectors.

[0679] Specific expression and purification conditions will vary depending upon the expression system employed. For example, if a gene is to be expressed in E. coli, it is first cloned into an expression vector by positioning the engineered gene downstream from a suitable bacterial promoter, e.g., Trp or Tac, and a prokaryotic signal sequence. In another example, if the engineered gene is to be expressed in eukaryotic host cells, e.g., CHO cells, it is first inserted into an expression vector containing for example, a suitable eukaryotic promoter, a secretion signal, enhancers, and various introns. The gene construct can be introduced into the host cells using transfection, transformation, or transduction techniques.

[0680] The Fc-based chimeric protein complex of the present technology can be produced by growing a host cell transfected with an expression vector encoding the Fc-based chimeric protein complex under conditions that permit expression of the protein. Following expression, the protein can be harvested and purified using techniques well known in the art, e.g., affinity tags such as glutathione-S-transferase (GST) and histidine (His) tags or by chromatography. In an embodiment, the Fc-based chimeric protein complex comprises a His tag. In an embodiment, the Fc-based chimeric protein complex comprises a His tag and a proteolytic site to allow cleavage of the His tag.

[0681] Accordingly, in various embodiments, the present invention provides for a nucleic acid encoding an Fc-based chimeric protein complex of the present invention. In various embodiments, the present invention provides for a host cell comprising a nucleic acid encoding an Fc-based chimeric protein complex of the present invention.

[0682] In various embodiments, the methods of modifying and producing the Fc-based chimeric protein complex as described herein can be easily adapted for the modification and production of any multi-specific Fc-based chimeric protein complex comprising two or more targeting moieties and/or human IFNγ or human TNFα signaling agents.

[0683] In various embodiments, the present Fc-based chimeric protein complex may be expressed in vivo, for instance, in a patient. For example, in various embodiments, the present Fc-based chimeric protein complex may be administered in the form of nucleic acid which encodes the present Fc-based chimeric protein complex. In various embodiments, the nucleic acid is DNA or RNA. In some embodiments, the present Fc-based chimeric protein complex is encoded by a modified mRNA, i.e. an mRNA comprising one or more modified nucleotides. In some embodiments, the modified mRNA comprises one or modifications found in U.S. Pat. No. 8,278,036, the entire contents of which are hereby incorporated by reference. In some embodiments, the modified mRNA comprises one or more of m5C, m5U, m6A, s2U, 4W, and 2′-O-methyl-U. In some embodiments, the present invention relates to administering a modified mRNA encoding one or more of the present Fc-based chimeric protein complexes. In some embodiments, the present invention relates to gene therapy vectors comprising the same. In some embodiments, the present invention relates to gene therapy methods comprising the same. In various embodiments, the nucleic acid is in the form of an oncolytic virus, e.g. an adenovirus, reovirus, measles, herpes simplex, Newcastle disease virus or vaccinia.

### Pharmaceutically Acceptable Salts and Excipients

[0684] The Fc-based chimeric protein complex described herein can possess a sufficiently basic functional group, which can react with an inorganic or organic acid, or a carboxyl group, which can react with an inorganic or organic base, to form a pharmaceutically acceptable salt. A pharmaceutically acceptable acid addition salt is formed from a pharmaceutically acceptable acid, as is well known in the art. Such salts include the pharmaceutically acceptable salts listed in, for example, Journal of Pharmaceutical Science, 66, 2-19 (1977) and The Handbook of Pharmaceutical Salts; Properties, Selection, and Use. P. H. Stahl and C. G. Wermuth (eds.), Verlag, Zurich (Switzerland) 2002, which are hereby incorporated by reference in their entirety.

[0685] Pharmaceutically acceptable salts include, by way of non-limiting example, sulfate, citrate, acetate, oxalate, chloride, bromide, iodide, nitrate, bisulfate, phosphate, acid phosphate, isonicotinate, lactate, salicylate, acid citrate, tartrate, oleate, tannate, pantothenate, bitartrate, ascorbate, succinate, maleate, gentisinate, fumarate, gluconate, glucaronate, saccharate, formate, benzoate, glutamate, methanesulfonate, ethanesulfonate, benzenesulfonate, p-toluenesulfonate, camphorsulfonate, pamoate, phenylacetate, trifluoroacetate, acrylate, chlorobenzoate, dinitrobenzoate, hydroxybenzoate, methoxybenzoate, methylbenzoate, o-acetoxybenzoate, naphthalene-2-benzoate, isobutyrate, phenylbutyrate, α-hydroxybutyrate, butyne-1,4-dicarboxylate, hexyne-1,4-dicarboxylate, caprate, caprylate, cinnamate, glycollate, heptanoate, hippurate, malate, hydroxymaleate, malonate, mandelate, mesylate, nicotinate, phthalate, teraphthalate, propiolate, propionate, phenylpropionate, sebacate, suberate, p-bromobenzenesulfonate, chlorobenzenesulfonate, ethylsulfonate, 2-hydroxyethylsulfonate, methylsulfonate, naphthalene-1-sulfonate, naphthalene-2-sulfonate, naphthalene-1,5-sulfonate, xylenesulfonate, and tartarate salts.

[0686] The term “pharmaceutically acceptable salt” also refers to a salt of the compositions of the present invention having an acidic functional group, such as a carboxylic acid functional group, and a base. Suitable bases include, but are not limited to, hydroxides of alkali metals such as sodium, potassium, and lithium; hydroxides of alkaline earth metal such as calcium and magnesium; hydroxides of other metals, such as aluminum and zinc; ammonia, and organic amines, such as unsubstituted or hydroxy-substituted mono-, di-, or tri-alkylamines, dicyclohexylamine; tributyl amine; pyridine; N-methyl, N-ethylamine; diethylamine; triethylamine; mono-, bis-, or tris-(2-OH-lower alkylamines), such as mono-; bis-, or tris-(2-hydroxyethyl)amine, 2-hydroxy-tert-butylamine, or tris-(hydroxymethyl)methylamine, N,N-di-lower alkyl-N-(hydroxyl-lower alkyl)-amines, such as N,N-dimethyl-N-(2-hydroxyethyl)amine or tri-(2-hydroxyethyl)amine; N-methyl-D-glucamine; and amino acids such as arginine, lysine, and the like.

[0687] In some embodiments, the compositions described herein are in the form of a pharmaceutically acceptable salt.

### Pharmaceutical Compositions and Formulations

[0688] In various embodiments, the present invention pertains to pharmaceutical compositions comprising the Fc-based chimeric protein complex described herein and a pharmaceutically acceptable carrier or excipient. In some embodiments, the present invention pertains to pharmaceutical compositions comprising the present Fc-based chimeric protein complex. In a further embodiment, the present invention pertains to pharmaceutical compositions comprising a combination of the present Fc-based chimeric protein complex and any other therapeutic agents described herein. Any pharmaceutical compositions described herein can be administered to a subject as a component of a composition that comprises a pharmaceutically acceptable carrier or vehicle. Such compositions can optionally comprise a suitable amount of a pharmaceutically acceptable excipient so as to provide the form for proper administration.

[0689] In various embodiments, pharmaceutical excipients can be liquids, such as water and oils, including those of petroleum, animal, vegetable, or synthetic origin, such as peanut oil, soybean oil, mineral oil, sesame oil and the like. The pharmaceutical excipients can be, for example, saline, gum acacia, gelatin, starch paste, talc, keratin, colloidal silica, urea and the like. In addition, auxiliary, stabilizing, thickening, lubricating, and coloring agents can be used. In one embodiment, the pharmaceutically acceptable excipients are sterile when administered to a subject. Water is a useful excipient when any agent described herein is administered intravenously. Saline solutions and aqueous dextrose and glycerol solutions can also be employed as liquid excipients, specifically for injectable solutions. Suitable pharmaceutical excipients also include starch, glucose, lactose, sucrose, gelatin, malt, rice, flour, chalk, silica gel, sodium stearate, glycerol monostearate, talc, sodium chloride, dried skim milk, glycerol, propylene, glycol, water, ethanol and the like. Any agent described herein, if desired, can also comprise minor amounts of wetting or emulsifying agents, or pH buffering agents. Other examples of suitable pharmaceutical excipients are described in Remington's Pharmaceutical Sciences 1447-1676 (Alfonso R. Gennaro eds., 19th ed. 1995), incorporated herein by reference.

[0690] The present invention includes the described pharmaceutical compositions (and/or additional therapeutic agents) in various formulations. Any inventive pharmaceutical composition (and/or additional therapeutic agents) described herein can take the form of solutions, suspensions, emulsion, drops, tablets, pills, pellets, capsules, capsules containing liquids, gelatin capsules, powders, sustained-release formulations, suppositories, emulsions, aerosols, sprays, suspensions, lyophilized powder, frozen suspension, desiccated powder, or any other form suitable for use. In one embodiment, the composition is in the form of a capsule. In another embodiment, the composition is in the form of a tablet. In yet another embodiment, the pharmaceutical composition is formulated in the form of a soft-gel capsule. In a further embodiment, the pharmaceutical composition is formulated in the form of a gelatin capsule. In yet another embodiment, the pharmaceutical composition is formulated as a liquid.

[0691] Where necessary, the inventive pharmaceutical compositions (and/or additional agents) can also include a solubilizing agent. Also, the agents can be delivered with a suitable vehicle or delivery device as known in the art. Combination therapies outlined herein can be co-delivered in a single delivery vehicle or delivery device.

[0692] The formulations comprising the inventive pharmaceutical compositions (and/or additional agents) of the present invention may conveniently be presented in unit dosage forms and may be prepared by any of the methods well known in the art of pharmacy. Such methods generally include the step of bringing the therapeutic agents into association with a carrier, which constitutes one or more accessory ingredients. Typically, the formulations are prepared by uniformly and intimately bringing the therapeutic agent into association with a liquid carrier, a finely divided solid carrier, or both, and then, if necessary, shaping the product into dosage forms of the desired formulation (e.g., wet or dry granulation, powder blends, etc., followed by tableting using conventional methods known in the art).

[0693] In various embodiments, any pharmaceutical compositions (and/or additional agents) described herein is formulated in accordance with routine procedures as a composition adapted for a mode of administration described herein.

[0694] Routes of administration include, for example: oral, intradermal, intramuscular, intraperitoneal, intravenous, subcutaneous, intranasal, epidural, sublingual, intranasal, intracerebral, intravaginal, transdermal, rectally, by inhalation, or topically. Administration can be local or systemic. In some embodiments, the administering is effected orally. In another embodiment, the administration is by parenteral injection. The mode of administration can be left to the discretion of the practitioner, and depends in-part upon the site of the medical condition. In most instances, administration results in the release of any agent described herein into the bloodstream.

[0695] In one embodiment, the Fc-based chimeric protein complex described herein is formulated in accordance with routine procedures as a composition adapted for oral administration. Compositions for oral delivery can be in the form of tablets, lozenges, aqueous or oily suspensions, granules, powders, emulsions, capsules, syrups, or elixirs, for example. Orally administered compositions can comprise one or more agents, for example, sweetening agents such as fructose, aspartame or saccharin; flavoring agents such as peppermint, oil of wintergreen, or cherry; coloring agents; and preserving agents, to provide a pharmaceutically palatable preparation. Moreover, where in tablet or pill form, the compositions can be coated to delay disintegration and absorption in the gastrointestinal tract thereby providing a sustained action over an extended period of time. Selectively permeable membranes surrounding an osmotically active driving any Fc-based chimeric protein complex described herein are also suitable for orally administered compositions. In these latter platforms, fluid from the environment surrounding the capsule is imbibed by the driving compound, which swells to displace the agent or agent composition through an aperture. These delivery platforms can provide an essentially zero order delivery profile as opposed to the spiked profiles of immediate release formulations. A time-delay material such as glycerol monostearate or glycerol stearate can also be useful. Oral compositions can include standard excipients such as mannitol, lactose, starch, magnesium stearate, sodium saccharin, cellulose, and magnesium carbonate. In one embodiment, the excipients are of pharmaceutical grade. Suspensions, in addition to the active compounds, may contain suspending agents such as, for example, ethoxylated isostearyl alcohols, polyoxyethylene sorbitol and sorbitan esters, microcrystalline cellulose, aluminum metahydroxide, bentonite, agar-agar, tragacanth, etc., and mixtures thereof.

[0696] Dosage forms suitable for parenteral administration (e.g. intravenous, intramuscular, intraperitoneal, subcutaneous and intra-articular injection and infusion) include, for example, solutions, suspensions, dispersions, emulsions, and the like. They may also be manufactured in the form of sterile solid compositions (e.g. lyophilized composition), which can be dissolved or suspended in sterile injectable medium immediately before use. They may contain, for example, suspending or dispersing agents known in the art. Formulation components suitable for parenteral administration include a sterile diluent such as water for injection, saline solution, fixed oils, polyethylene glycols, glycerine, propylene glycol or other synthetic solvents; antibacterial agents such as benzyl alcohol or methyl paraben; antioxidants such as ascorbic acid or sodium bisulfite; chelating agents such as EDTA; buffers such as acetates, citrates or phosphates; and agents for the adjustment of tonicity such as sodium chloride or dextrose.

[0697] For intravenous administration, suitable carriers include physiological saline, bacteriostatic water, Cremophor ELTM (BASF, Parsippany, NJ) or phosphate buffered saline (PBS). The carrier should be stable under the conditions of manufacture and storage, and should be preserved against microorganisms. The carrier can be a solvent or dispersion medium containing, for example, water, ethanol, polyol (for example, glycerol, propylene glycol, and liquid polyetheylene glycol), and suitable mixtures thereof.

[0698] The compositions provided herein, alone or in combination with other suitable components, can be made into aerosol formulations (i.e., “nebulized”) to be administered via inhalation. Aerosol formulations can be placed into pressurized acceptable propellants, such as dichlorodifluoromethane, propane, nitrogen, and the like.

[0699] Any inventive pharmaceutical compositions (and/or additional agents) described herein can be administered by controlled-release or sustained-release means or by delivery devices that are well known to those of ordinary skill in the art. Examples include, but are not limited to, those described in U.S. Pat. Nos. 3,845,770; 3,916,899; 3,536,809; 3,598,123; 4,008,719; 5,674,533; 5,059,595; 5,591,767; 5,120,548; 5,073,543; 5,639,476; 5,354,556; and 5,733,556, each of which is incorporated herein by reference in its entirety. Such dosage forms can be useful for providing controlled- or sustained-release of one or more active ingredients using, for example, hydropropyl cellulose, hydropropylmethyl cellulose, polyvinylpyrrolidone, other polymer matrices, gels, permeable membranes, osmotic systems, multilayer coatings, microparticles, liposomes, microspheres, or a combination thereof to provide the desired release profile in varying proportions. Suitable controlled- or sustained-release formulations known to those skilled in the art, including those described herein, can be readily selected for use with the active ingredients of the agents described herein. The invention thus provides single unit dosage forms suitable for oral administration such as, but not limited to, tablets, capsules, gelcaps, and caplets that are adapted for controlled- or sustained-release.

[0700] Controlled- or sustained-release of an active ingredient can be stimulated by various conditions, including but not limited to, changes in pH, changes in temperature, stimulation by an appropriate wavelength of light, concentration or availability of enzymes, concentration or availability of water, or other physiological conditions or compounds.

[0701] In another embodiment, a controlled-release system can be placed in proximity of the target area to be treated, thus requiring only a fraction of the systemic dose (see, e.g., Goodson, in Medical Applications of Controlled Release, supra, vol. 2, pp. 115-138 (1984)). Other controlled-release systems discussed in the review by Langer, 1990, Science 249:1527-1533) may be used.

[0702] Pharmaceutical formulations preferably are sterile. Sterilization can be accomplished, for example, by filtration through sterile filtration membranes. Where the composition is lyophilized, filter sterilization can be conducted prior to or following lyophilization and reconstitution.

### Administration and Dosage

[0703] It will be appreciated that the actual dose of the Fc-based chimeric protein complex described herein to be administered according to the present invention will vary according to the particular dosage form, and the mode of administration. Many factors that may modify the action of the Fc-based chimeric protein complex (e.g., body weight, gender, diet, time of administration, route of administration, rate of excretion, condition of the subject, drug combinations, genetic disposition and reaction sensitivities) can be taken into account by those skilled in the art. Administration can be carried out continuously or in one or more discrete doses within the maximum tolerated dose. Optimal administration rates for a given set of conditions can be ascertained by those skilled in the art using conventional dosage administration tests.

[0704] In some embodiments, a suitable dosage of the Fc-based chimeric protein complex described herein is in a range of about 0.01 mg/kg to about 10 g/kg of body weight of the subject, about 0.01 mg/kg to about 1 g/kg of body weight of the subject, about 0.01 mg/kg to about 100 mg/kg of body weight of the subject, about 0.01 mg/kg to about 10 mg/kg of body weight of the subject, for example, about 0.01 mg/kg, about 0.02 mg/kg, about 0.03 mg/kg, about 0.04 mg/kg, about 0.05 mg/kg, about 0.06 mg/kg, about 0.07 mg/kg, about 0.08 mg/kg, about 0.09 mg/kg, about 0.1 mg/kg, about 0.2 mg/kg, about 0.3 mg/kg, about 0.4 mg/kg, about 0.5 mg/kg, about 0.6 mg/kg, about 0.7 mg/kg, about 0.8 mg/kg, about 0.9 mg/kg, about 1 mg/kg, about 1.1 mg/kg, about 1.2 mg/kg, about 1.3 mg/kg, about 1.4 mg/kg, about 1.5 mg/kg, about 1.6 mg/kg, about 1.7 mg/kg, about 1.8 mg/kg, 1.9 mg/kg, about 2 mg/kg, about 3 mg/kg, about 4 mg/kg, about 5 mg/kg, about 6 mg/kg, about 7 mg/kg, about 8 mg/kg, about 9 mg/kg, about 10 mg/kg body weight, about 100 mg/kg body weight, about 1 g/kg of body weight, about 10 g/kg of body weight, inclusive of all values and ranges there between.

[0705] Individual doses of the Fc-based chimeric protein complex described herein can be administered in unit dosage forms containing, for example, from about 0.01 mg to about 100 g, from about 0.01 mg to about 75 g, from about 0.01 mg to about 50 g, from about 0.01 mg to about 25 g, about 0.01 mg to about 10 g, about 0.01 mg to about 7.5 g, about 0.01 mg to about 5 g, about 0.01 mg to about 2.5 g, about 0.01 mg to about 1 g, about 0.01 mg to about 100 mg, from about 0.1 mg to about 100 mg, from about 0.1 mg to about 90 mg, from about 0.1 mg to about 80 mg, from about 0.1 mg to about 70 mg, from about 0.1 mg to about 60 mg, from about 0.1 mg to about 50 mg, from about 0.1 mg to about 40 mg active ingredient, from about 0.1 mg to about 30 mg, from about 0.1 mg to about 20 mg, from about 0.1 mg to about 10 mg, from about 0.1 mg to about 5 mg, from about 0.1 mg to about 3 mg, from about 0.1 mg to about 1 mg per unit dosage form, or from about 5 mg to about 80 mg per unit dosage form. For example, a unit dosage form can be about 0.01 mg, about 0.02 mg, about 0.03 mg, about 0.04 mg, about 0.05 mg, about 0.06 mg, about 0.07 mg, about 0.08 mg, about 0.09 mg, about 0.1 mg, about 0.2 mg, about 0.3 mg, about 0.4 mg, about 0.5 mg, about 0.6 mg, about 0.7 mg, about 0.8 mg, about 0.9 mg, about 1 mg, about 2 mg, about 3 mg, about 4 mg, about 5 mg, about 6 mg, about 7 mg, about 8 mg, about 9 mg about 10 mg, about 15 mg, about 20 mg, about 25 mg, about 30 mg, about 35 mg, about 40 mg, about 45 mg, about 50 mg, about 55 mg, about 60 mg, about 65 mg, about 70 mg, about 75 mg, about 80 mg, about 85 mg, about 90 mg, about 95 mg, about 100 mg, about 200 mg, about 500 mg, about 1 g, about 2.5 g, about 5 g, about 10 g, about 25 g, about 50 g, about 75 g, about 100 g, inclusive of all values and ranges there between.

[0706] In one embodiment, the Fc-based chimeric protein complex described herein are administered at an amount of from about 0.01 mg to about 100 g daily, from about 0.01 mg to about 75 g daily, from about 0.01 mg to about 50 g daily, from about 0.01 mg to about 25 g daily, from about 0.01 mg to about 10 g daily, from about 0.01 mg to about 7.5 g daily, from about 0.01 mg to about 5 g daily, from about 0.01 mg to about 2.5 g daily, from about 0.01 mg to about 1 g daily, from about 0.01 mg to about 100 mg daily, from about 0.1 mg to about 100 mg daily, from about 0.1 mg to about 95 mg daily, from about 0.1 mg to about 90 mg daily, from about 0.1 mg to about 85 mg daily, from about 0.1 mg to about 80 mg daily, from about 0.1 mg to about 75 mg daily, from about 0.1 mg to about 70 mg daily, from about 0.1 mg to about 65 mg daily, from about 0.1 mg to about 60 mg daily, from about 0.1 mg to about 55 mg daily, from about 0.1 mg to about 50 mg daily, from about 0.1 mg to about 45 mg daily, from about 0.1 mg to about 40 mg daily, from about 0.1 mg to about 35 mg daily, from about 0.1 mg to about 30 mg daily, from about 0.1 mg to about 25 mg daily, from about 0.1 mg to about 20 mg daily, from about 0.1 mg to about 15 mg daily, from about 0.1 mg to about 10 mg daily, from about 0.1 mg to about 5 mg daily, from about 0.1 mg to about 3 mg daily, from about 0.1 mg to about 1 mg daily, or from about 5 mg to about 80 mg daily. In various embodiments, the Fc-based chimeric protein complex is administered at a daily dose of about 0.01 mg, about 0.02 mg, about 0.03 mg, about 0.04 mg, about 0.05 mg, about 0.06 mg, about 0.07 mg, about 0.08 mg, about 0.09 mg, about 0.1 mg, about 0.2 mg, about 0.3 mg, about 0.4 mg, about 0.5 mg, about 0.6 mg, about 0.7 mg, about 0.8 mg, about 0.9 mg, about 1 mg, about 2 mg, about 3 mg, about 4 mg, about 5 mg, about 6 mg, about 7 mg, about 8 mg, about 9 mg about 10 mg, about 15 mg, about 20 mg, about 25 mg, about 30 mg, about 35 mg, about 40 mg, about 45 mg, about 50 mg, about 55 mg, about 60 mg, about 65 mg, about 70 mg, about 75 mg, about 80 mg, about 85 mg, about 90 mg, about 95 mg, about 100 mg, about 200 mg, about 500 mg, about 1 g, about 2.5 g, about 5 g, about 7.5 g, about 10 g, about 25 g, about 50 g, about 75 g, about 100 g, inclusive of all values and ranges there between.

[0707] In accordance with certain embodiments of the invention, the pharmaceutical composition comprising the Fc-based chimeric protein complex described herein may be administered, for example, more than once daily (e.g., about two times, about three times, about four times, about five times, about six times, about seven times, about eight times, about nine times, or about ten times daily), about once per day, about every other day, about every third day, about once a week, about once every two weeks, about once every month, about once every two months, about once every three months, about once every six months, or about once every year.

### Combination Therapy and Additional Therapeutic Agents

[0708] In various embodiments, the pharmaceutical composition of the present invention is co-administered in conjunction with additional therapeutic agent(s). Co-administration can be simultaneous or sequential.

[0709] In one embodiment, the additional therapeutic agent and the Fc-based chimeric protein complex are administered to a subject simultaneously. The term “simultaneously” as used herein, means that the additional therapeutic agent and the Fc-based chimeric protein complex are administered with a time separation of no more than about 60 minutes, such as no more than about 30 minutes, no more than about 20 minutes, no more than about 10 minutes, no more than about 5 minutes, or no more than about 1 minute. Administration of the additional therapeutic agent and the Fc-based chimeric protein complex be by simultaneous administration of a single formulation (e.g., a formulation comprising the additional therapeutic agent and the Fc-based chimeric protein complex) or of separate formulations (e.g., a first formulation including the additional therapeutic agent and a second formulation including the Fc-based chimeric protein complex).

[0710] Co-administration does not require the therapeutic agents to be administered simultaneously, if the timing of their administration is such that the pharmacological activities of the additional therapeutic agent and the Fc-based chimeric protein complex overlap in time, thereby exerting a combined therapeutic effect. For example, the additional therapeutic agent and the Fc-based chimeric protein complex can be administered sequentially. The term “sequentially” as used herein means that the additional therapeutic agent and the Fc-based chimeric protein complex are administered with a time separation of more than about 60 minutes. For example, the time between the sequential administration of the additional therapeutic agent and the Fc-based chimeric protein complex can be more than about 60 minutes, more than about 2 hours, more than about 5 hours, more than about 10 hours, more than about 1 day, more than about 2 days, more than about 3 days, more than about 1 week, or more than about 2 weeks, or more than about one month apart. The optimal administration times will depend on the rates of metabolism, excretion, and/or the pharmacodynamic activity of the additional therapeutic agent and the Fc-based chimeric protein complex being administered. Either the additional therapeutic agent or the Fc-based chimeric protein complex may be administered first.

[0711] Co-administration also does not require the therapeutic agents to be administered to the subject by the same route of administration. Rather, each therapeutic agent can be administered by any appropriate route, for example, parenterally or non-parenterally.

[0712] In some embodiments, the Fc-based chimeric protein complex described herein acts synergistically when co-administered with another therapeutic agent. In such embodiments, the Fc-based chimeric protein complex and the additional therapeutic agent may be administered at doses that are lower than the doses employed when the agents are used in the context of monotherapy.

[0713] In some embodiments, the present invention pertains to chemotherapeutic agents as additional therapeutic agents. For example, without limitation, such combination of the present Fc-based chimeric protein complex and chemotherapeutic agent find use in the treatment of cancers, as described elsewhere herein. Examples of chemotherapeutic agents include, but are not limited to, alkylating agents such as thiotepa and CYTOXAN cyclosphosphamide; alkyl sulfonates such as busulfan, improsulfan and piposulfan; aziridines such as benzodopa, carboquone, meturedopa, and uredopa; ethylenimines and methylamelamines including altretamine, triethylenemelamine, trietylenephosphoramide, triethiylenethiophosphoramide and trimethylolomelamine; acetogenins (e.g., bullatacin and bullatacinone); a camptothecin (including the synthetic analogue topotecan); bryostatin; cally statin; CC-1065 (including its adozelesin, carzelesin and bizelesin synthetic analogues); cryptophycins (e.g., cryptophycin 1 and cryptophycin 8); dolastatin; duocarmycin (including the synthetic analogues, KW-2189 and CB 1-TM1); eleutherobin; pancratistatin; a sarcodictyin; spongistatin; nitrogen mustards such as chlorambucil, chlornaphazine, cholophosphamide, estramustine, ifosfamide, mechlorethamine, mechlorethamine oxide hydrochloride, melphalan, novembichin, phenesterine, prednimustine, trofosfamide, uracil mustard; nitrosureas such as carmustine, chlorozotocin, fotemustine, lomustine, nimustine, and ranimnustine; antibiotics such as the enediyne antibiotics (e.g., calicheamicin, especially calicheamicin gammaII and calicheamicin omegaII (see, e.g., Agnew, Chem. Intl. Ed. Engl., 33: 183-186 (1994)); dynemicin, including dynemicin A; bisphosphonates, such as clodronate; an esperamicin; as well as neocarzinostatin chromophore and related chromoprotein enediyne antibiotic chromophores), aclacinomysins, actinomycin, authramycin, azaserine, bleomycins, cactinomycin, carabicin, caminomycin, carzinophilin, chromomycinis, dactinomycin, daunorubicin, detorubicin, 6-diazo-5-oxo-L-norleucine, ADRIAMYCIN doxorubicin (including morpholino-doxorubicin, cyanomorpholino-doxorubicin, 2-pyrrolino-doxorubicin and deoxy doxorubicin), epirubicin, esorubicin, idarubicin, marcellomycin, mitomycins such as mitomycin C, mycophenolic acid, nogalamycin, olivomycins, peplomycin, potfiromycin, puromycin, quelamycin, rodorubicin, streptonigrin, streptozocin, tubercidin, ubenimex, zinostatin, zorubicin; anti-metabolites such as methotrexate and 5-fluorouracil (5-FU); folic acid analogues such as denopterin, methotrexate, pteropterin, trimetrexate; purine analogs such as fludarabine, 6-mercaptopurine, thiamiprine, thioguanine; pyrimidine analogs such as ancitabine, azacitidine, 6-azauridine, carmofur, cytarabine, dideoxyuridine, doxifluridine, enocitabine, floxuridine; androgens such as calusterone, dromostanolone propionate, epitiostanol, mepitiostane, testolactone; anti-adrenals such as minoglutethimide, mitotane, trilostane; folic acid replenisher such as frolinic acid; aceglatone; aldophosphamide glycoside; aminolevulinic acid; eniluracil; amsacrine; bestrabucil; bisantrene; edatraxate; demecolcine; diaziquone; elformithine; elliptinium acetate; an epothilone; etoglucid; gallium nitrate; hydroxyurea; lentinan; lonidainine; maytansinoids such as maytansine and ansamitocins; mitoguazone; mitoxantrone; mopidanmol; nitraerine; pentostatin; phenamet; pirarubicin; losoxantrone; podophyllinic acid; 2-ethylhydrazide; procarbazine; PSK polysaccharide complex (JHS Natural Products, Eugene, Oreg.); razoxane; rhizoxin; sizofuran; spirogermanium; tenuazonic acid; triaziquone; 2,2′,2″-trichlorotriethylamine; trichothecenes (e.g., T-2 toxin, verracurin A, roridin A and anguidine); urethan; vindesine; dacarbazine; mannomustine; mitobronitol; mitolactol; pipobroman; gacytosine; arabinoside (“Ara-C”); cyclophosphamide; thiotepa; taxoids, e.g., TAXOL paclitaxel (Bristol-Myers Squibb Oncology, Princeton, N.J.), ABRAXANE Cremophor-free, albumin-engineered nanoparticle formulation of paclitaxel (American Pharmaceutical Partners, Schaumberg, 111.), and TAXOTERE doxetaxel (Rhone-Poulenc Rorer, Antony, France); chloranbucil; GEMZAR gemcitabine; 6-thioguanine; mercaptopurine; methotrexate; platinum analogs such as cisplatin, oxaliplatin and carboplatin; vinblastine; platinum; etoposide (VP-16); ifosfamide; mitoxantrone; vincristine; NAVELBINE. vinorelbine; novantrone; teniposide; edatrexate; daunomycin; aminopterin; xeloda; ibandronate; irinotecan (Camptosar, CPT-11) (including the treatment regimen of irinotecan with 5-FU and leucovorin); topoisomerase inhibitor RFS 2000; difluoromethylornithine (DMFO); retinoids such as retinoic acid; capecitabine; combretastatin; leucovorin (LV); oxaliplatin, including the oxaliplatin treatment regimen (FOLFOX); lapatinib (Tykerb); inhibitors of PKC-α, Raf, H-Ras, EGFR (e.g., erlotinib (Tarceva)) and VEGF-A that reduce cell proliferation and pharmaceutically acceptable salts, acids or derivatives of any of the above. In addition, the methods of treatment can further include the use of radiation. In addition, the methods of treatment can further include the use of photodynamic therapy.

[0714] Accordingly, in some embodiments, the present invention relates to combination therapies using the Fc-based chimeric protein complex and a chemotherapeutic agent. In some embodiments, the present invention relates to administration of the Fc-based chimeric protein complex to a patient undergoing treatment with a chemotherapeutic agent. In some embodiments, the chemotherapeutic agent is a DNA-intercalating agent such as, without limitation, doxorubicin, cisplatin, daunorubicin, and epirubicin. In an embodiment, the DNA-intercalating agent is doxorubicin.

[0715] In illustrative embodiments, the Fc-based chimeric protein complex acts synergistically when co-administered with doxorubicin. In an illustrative embodiment, the Fc-based chimeric protein complex acts synergistically when co-administered with doxorubicin for use in treating tumor or cancer. For example, co-administration of the Fc-based chimeric protein complex and doxorubicin may act synergistically to reduce or eliminate the tumor or cancer, or slow the growth and/or progression and/or metastasis of the tumor or cancer. In illustrative embodiments, the combination of the Fc-based chimeric protein complex and doxorubicin may exhibit improved safety profiles when compared to the agents used alone in the context of monotherapy. In illustrative embodiments, the Fc-based chimeric protein complex and doxorubicin may be administered at doses that are lower than the doses employed when the agents are used in the context of monotherapy.

[0716] In some embodiments, the present invention relates to combination therapy with one or more immune-modulating agents, for example, without limitation, agents that modulate immune checkpoint. In various embodiments, the immune-modulating agent targets one or more of PD-1, PD-L1, and PD-L2. In various embodiments, the immune-modulating agent is PD-1 inhibitor. In various embodiments, the immune-modulating agent is an antibody specific for one or more of PD-1, PD-L1, and PD-L2. For instance, in some embodiments, the immune-modulating agent is an antibody such as, by way of non-limitation, nivolumab, (ONO-4538/BMS-936558, MDX1106, OPDIVO, BRISTOL MYERS SQUIBB), pembrolizumab (KEYTRUDA, MERCK), pidilizumab (CT-011, CURE TECH), MK-3475 (MERCK), BMS 936559 (BRISTOL MYERS SQUIBB), MPDL3280A (ROCHE). In some embodiments, the immune-modulating agent targets one or more of CD137 or CD137L. In various embodiments, the immune-modulating agent is an antibody specific for one or more of CD137 or CD137L. For instance, in some embodiments, the immune-modulating agent is an antibody such as, by way of non-limitation, urelumab (also known as BMS-663513 and anti-4-1BB antibody). In some embodiments, the present Fc-based chimeric protein complex is combined with urelumab (optionally with one or more of nivolumab, lirilumab, and urelumab) for the treatment of solid tumors and/or B-cell non-Hodgkins lymphoma and/or head and neck cancer and/or multiple myeloma. In some embodiments, the immune-modulating agent is an agent that targets one or more of CTLA-4, AP2M1, CD80, CD86, SHP-2, and PPP2R5A. In various embodiments, the immune-modulating agent is an antibody specific for one or more of CTLA-4, AP2M1, CD80, CD86, SHP-2, and PPP2R5A. For instance, in some embodiments, the immune-modulating agent is an antibody such as, by way of non-limitation, ipilimumab (MDX-010, MDX-101, Yervoy, BMS) and/or tremelimumab (Pfizer). In some embodiments, the present Fc-based chimeric protein complex is combined with ipilimumab (optionally with bavituximab) for the treatment of one or more of melanoma, prostate cancer, and lung cancer. In various embodiments, the immune-modulating agent targets CD20. In various embodiments, the immune-modulating agent is an antibody specific CD20. For instance, in some embodiments, the immune-modulating agent is an antibody such as, by way of non-limitation, Ofatumumab (GENMAB), obinutuzumab (GAZYVA), AME-133v (APPLIED MOLECULAR EVOLUTION), Ocrelizumab (GENENTECH), TRU-015 (TRUBION/EMERGENT), veltuzumab (IMMU-106).

[0717] In some embodiments, the present invention relates to combination therapy using the Fc-based chimeric protein complex and a checkpoint inhibitor. In some embodiments, the present invention relates to administration of the Fc-based chimeric protein complex to a patient undergoing treatment with a checkpoint inhibitor. In some embodiments, the checkpoint inhibitor is an agent that targets one or more of PD-1, PD-L1, PD-L2, and CTLA-4 (including any of the anti-PD-1, anti-PD-L1, anti-PD-L2, and anti-CTLA-4 agents described herein). In some embodiment, the checkpoint inhibitor is one or more of nivolumab, (ONO-4538/BMS-936558, MDX1106, OPDIVO, BRISTOL MYERS SQUIBB), pembrolizumab (KEYTRUDA, MERCK), pidilizumab (CT-011, CURE TECH), MK-3475 (MERCK), BMS 936559 (BRISTOL MYERS SQUIBB), MPDL3280A (ROCHE), ipilimumab (MDX-010, MDX-101, Yervoy, BMS) and tremelimumab (Pfizer). In an embodiment, the checkpoint inhibitor is an antibody against PD-L1.

[0718] In illustrative embodiments, the Fc-based chimeric protein complex acts synergistically when co-administered with the anti-PD-L1 antibody. In an illustrative embodiment, the Fc-based chimeric protein complex acts synergistically when co-administered with the anti-PD-L1 antibody for use in treating tumor or cancer. For example, co-administration of the Fc-based chimeric protein complex and the anti-PD-L1 antibody may act synergistically to reduce or eliminate the tumor or cancer, or slow the growth and/or progression and/or metastasis of the tumor or cancer. In some embodiments, the combination of the Fc-based chimeric protein complex and the anti-PD-L1 antibody may exhibit improved safety profiles when compared to the agents used alone in the context of monotherapy. In some embodiments, the Fc-based chimeric protein complex and the anti-PD-L1 antibody may be administered at doses that are lower than the doses employed when the agents are used in the context of monotherapy.

[0719] In some embodiments, the present invention relates to combination therapies using the Fc-based chimeric protein complex and an immunosuppressive agent. In some embodiments, the present invention relates to administration of the Fc-based chimeric protein complex to a patient undergoing treatment with an immunosuppressive agent. In an embodiment, the immunosuppressive agent is TNF.

[0720] In illustrative embodiments, the Fc-based chimeric protein complex acts synergistically when co-administered with TNF. In an illustrative embodiment, the Fc-based chimeric protein complex acts synergistically when co-administered with TNF for use in treating tumor or cancer. For example, co-administration of the Fc-based chimeric protein complex and TNF may act synergistically to reduce or eliminate the tumor or cancer, or slow the growth and/or progression and/or metastasis of the tumor or cancer. In some embodiments, the combination of the Fc-based chimeric protein complex and TNF may exhibit improved safety profiles when compared to the agents used alone in the context of monotherapy. In some embodiments, the Fc-based chimeric protein complex and TNF may be administered at doses that are lower than the doses employed when the agents are used in the context of monotherapy.

[0721] In some embodiments, the Fc-based chimeric protein complex acts synergistically when used in combination with Chimeric Antigen Receptor (CAR) T-cell therapy. In an illustrative embodiment, the Fc-based chimeric protein complex acts synergistically when used in combination with CAR T-cell therapy in treating tumor or cancer. In an embodiment, the Fc-based chimeric protein complex acts synergistically when used in combination with CAR T-cell therapy in treating blood-based tumors. In an embodiment, the Fc-based chimeric protein complex acts synergistically when used in combination with CAR T-cell therapy in treating solid tumors. For example, use of the Fc-based chimeric protein complex and CAR T-cells may act synergistically to reduce or eliminate the tumor or cancer, or slow the growth and/or progression and/or metastasis of the tumor or cancer. In various embodiments, the Fc-based chimeric protein complex of the invention induces CAR T-cell division. In various embodiments, the Fc-based chimeric protein complex of the invention induces CAR T-cell proliferation. In various embodiments, the Fc-based chimeric protein complex of the invention prevents anergy of the CAR T cells.

[0722] In various embodiments, the CAR T-cell therapy comprises CAR T cells that target antigens (e.g., tumor antigens) such as, but not limited to, carbonic anhydrase IX (CAIX), 5T4, CD19, CD20, CD22, CD30, CD33, CD38, CD47, CS1, CD138, Lewis-Y, L1-CAM, MUC16, ROR-1, IL13Ra2, gp100, prostate stem cell antigen (PSCA), prostate-specific membrane antigen (PSMA), B-cell maturation antigen (BCMA), human papillomavirus type 16 E6 (HPV-16 E6), CD171, folate receptor alpha (FR-α), GD2, human epidermal growth factor receptor 2 (HER2), mesothelin, EGFRvIII, fibroblast activation protein (FAP), carcinoembryonic antigen (CEA), and vascular endothelial growth factor receptor 2 (VEGF-R2), as well as other tumor antigens well known in the art. Additional illustrative tumor antigens include, but are not limited to MART-1/Melan-A, gp100, Dipeptidyl peptidase IV (DPPIV), adenosine deaminase-binding protein (ADAbp), cyclophilin b, Colorectal associated antigen (CRC)-0017-1A/GA733, Carcinoembryonic Antigen (CEA) and its immunogenic epitopes CAP-1 and CAP-2, etv6, aml1, Prostate Specific Antigen (PSA) and its immunogenic epitopes PSA-1, PSA-2, and PSA-3, T-cell receptor/CD3-zeta chain, MAGE-family of tumor antigens (e.g., MAGE-A1, MAGE-A2, MAGE-A3, MAGE-A4, MAGE-A5, MAGE-A6, MAGE-A7, MAGE-A8, MAGE-A9, MAGE-A10, MAGE-A11, MAGE-A12, MAGE-Xp2 (MAGE-B2), MAGE-Xp3 (MAGE-B3), MAGE-Xp4 (MAGE-B4), MAGE-C1, MAGE-C2, MAGE-C3, MAGE-C4, MAGE-C5), GAGE-family of tumor antigens (e.g., GAGE-1, GAGE-2, GAGE-3, GAGE-4, GAGE-5, GAGE-6, GAGE-7, GAGE-8, GAGE-9), BAGE, RAGE, LAGE-1, NAG, GnT-V, MUM-1, CDK4, tyrosinase, p53, MUC family, HER2/neu, p21ras, RCAS1, α-fetoprotein, E-cadherin, α-catenin, β-catenin and γ-catenin, p120ctn, gp100 Pmel117, PRAME, NY-ESO-1, cdc27, adenomatous polyposis coli protein (APC), fodrin, Connexin 37, Ig-idiotype, p15, gp75, GM2 and GD2 gangliosides, viral products such as human papilloma virus proteins, Smad family of tumor antigens, Imp-1, NA, EBV-encoded nuclear antigen (EBNA)-1, brain glycogen phosphorylase, SSX-1, SSX-2 (HOM-MEL-40), SSX-1, SSX-4, SSX-5, SCP-1 CT-7, c-erbB-2, CD19, CD37, CD56, CD70, CD74, CD138, AGS16, MUC1, GPNMB, Ep-CAM, PD-L1, and PD-L2.

[0723] Exemplary CAR T-cell therapy include, but are not limited to, JCAR014 (Juno Therapeutics), JCAR015 (Juno Therapeutics), JCAR017 (Juno Therapeutics), JCAR018 (Juno Therapeutics), JCAR020 (Juno Therapeutics), JCAR023 (Juno Therapeutics), JCAR024 (Juno Therapeutics), CTL019 (Novartis), KTE-C19 (Kite Pharma), BPX-401 (Bellicum Pharmaceuticals), BPX-501 (Bellicum Pharmaceuticals), BPX-601 (Bellicum Pharmaceuticals), bb2121 (Bluebird Bio), CD-19 Sleeping Beauty cells (Ziopharm Oncology), UCART19 (Cellectis), UCART123 (Cellectis), UCART38 (Cellectis), UCARTCS1 (Cellectis), OXB-302 (Oxford BioMedica, MB-101 (Mustang Bio) and CAR T-cells developed by Innovative Cellular Therapeutics.

[0724] In some embodiments, the Fc-based chimeric protein complex is used in a method of treating multiple sclerosis (MS) in combination with one or more MS therapeutics including, but not limited to, 3-interferons, glatiramer acetate, T-interferon, IFN-ß-2 (U.S. Patent Publication No. 2002/0025304), spirogermaniums (e.g., N-(3-dimethylaminopropyl)-2-aza-8,8-dimethyl-8-germanspiro [4:5] decane, N-(3-dimethylaminopropyl)-2-aza-8,8-diethyl-8-germaspiro [4:5] decane, N-(3-dimethylaminopropyl)-2-aza-8,8-dipropyl-8-germaspiro [4:5] decane, and N-(3-dimethylaminopropyl)-2-aza-8, 8-dibutyl-8-germaspiro [4:5] decane), vitamin D analogs (e.g., 1,25 (OH) 2D3, (see, e.g., U.S. Pat. No. 5,716,946)), prostaglandins (e.g., latanoprost, brimonidine, PGE1, PGE2 and PGE3, see, e.g., U.S. Patent Publication No. 2002/0004525), tetracycline and derivatives (e.g., minocycline and doxycycline, see, e.g., U.S. Patent Publication No. 20020022608), a VLA-4 binding antibody (see, e.g., U.S. Patent Publication No. 2009/0202527), adrenocorticotrophic hormone, corticosteroid, prednisone, methylprednisone, 2-chlorodeoxyadenosine, mitoxantrone, sulphasalazine, methotrexate, azathioprine, cyclophosphamide, cyclosporin, fumarate, anti-CD20 antibody (e.g., rituximab), and tizanidine hydrochloride.

[0725] In some embodiments, the Fc-based chimeric protein complex is used in combination with one or more therapeutic agents that treat one or more symptoms or side effects of MS. Such agents include, but are not limited to, amantadine, baclofen, papaverine, meclizine, hydroxyzine, sulfamethoxazole, ciprofloxacin, docusate, pemoline, dantrolene, desmopressin, dexamethasone, tolterodine, phenyloin, oxybutynin, bisacodyl, venlafaxine, amitriptyline, methenamine, clonazepam, isoniazid, vardenafil, nitrofurantoin, psyllium hydrophilic mucilloid, alprostadil, gabapentin, nortriptyline, paroxetine, propantheline bromide, modafinil, fluoxetine, phenazopyridine, methylprednisolone, carbamazepine, imipramine, diazepam, sildenafil, bupropion, and sertraline.

[0726] In some embodiments, the Fc-based chimeric protein complex is used in a method of treating multiple sclerosis in combination with one or more of the disease modifying therapies (DMTs) described herein (e.g. the agents of Table A). In some embodiments, the present invention provides an improved therapeutic effect as compared to use of one or more of the DMTs described herein (e.g. the agents listed in the Table below) without the one or more disclosed binding agent. In an embodiment, the combination of the Fc-based chimeric protein complex and the one or more DMTs produces synergistic therapeutic effects.

### Illustrative Disease Modifying Therapies

| Generic Name | Branded Name/Company | Frequency/Route of Delivery/Usual Dose |
|---|---|---|
| teriflunomide | AUBAGIO (GENZYME) | Every day; pill taken orally; 7 mg or 14 mg. |
| interferon beta-1a | AVONEX (BIOGEN IDEC) | Once a week; intramuscular (into the muscle) |
| | | injection; 30 mcg |
| interferon beta-1b | BETASERON (BAYER | Every other day; subcutaneous (under the skin) |
| | HEALTHCARE | injection; 250 mcg. |
| | PHARMACEUTICALS, INC.) | |
| glatiramer acetate | COPAXONE (TEVA | Every day; subcutaneous (under the skin) |
| | NEUROSCIENCE) | injection; 20 mg (20,000 mcg) OR Three times a |
| | | week; subcutaneous (under the skin) injection; 40 |
| | | mg (40,000 mcg) |
| interferon beta-1b | EXTAVIA (NOVARTIS | Every other day; subcutaneous (under the skin) |
| | PHARMACEUTICALS CORP.) | injection; 250 mcg. |
| fingolimod | GILENYA (NOVARTIS | Every day; capsule taken orally; 0.5 mg. |
| | PHARMACEUTICALS CORP.) | |
| Alemtuzumab (anti-CD52 | LEMTRADA (GENZYME) | Intravenous infusion on five consecutive days, |
| monoclonal antibody) | | followed by intravenous infusion on three |
| | | consecutive days one year later (12 mg) |
| mitoxantrone | NOVANTRONE (EMD | Four times a year by IV infusion in a medical |
| | SERONO) | facility. Lifetime cumulative dose limit of |
| | | approximately 8-12 doses over 2-3 years (140 |
| | | mg/m2). |
| pegylated interferon beta-1a | PLEGRIDY (BIOGEN IDEC) | Every 14 days; subcutaneous (under the skin) |
| | | injection; 125 mcg |
| interferon beta-1a | REBIF (EMD SERONO, INC.) | Three times a week; subcutaneous (under the |
| | | skin) injection; 44 mcg |
| dimethyl fumarate (BG-12) | TECFIDERA (BIOGEN IDEC) | Twice a day; capsule taken orally; 120 mg for one |
| | | week and 240 mg therafter |
| Natalizumab (humanized | TYSABRI (BIOGEN IDEC) | Every four weeks by IV infusion in a registered |
| monoclonal antibody VLA-4 | | infusion facility; 300 mg |
| antagonist) | | |

DMTs in Development

| | | |
|---|---|---|
| Amiloride (targets Acid- | PAR PHARMACEUTICAL, | Oral |
| sensing ion channel-1 | PERRIGO COMPANY, | |
| Epithelial sodium channel | SIGMAPHARM | |
| Na+/H+ exchanger) | LABORATORIES | |
| ATX-MS-1467 (targets Major | APITOPE/MERCK SERONO | Intradermal Subcutaneous |
| histocompatibility complex | | |
| class II T cell responses to | | |
| myelin basic protein) | | |
| BAF312 (targets | NOVARTIS PHARMA | Oral |
| Sphingosine 1-phosphate | | |
| (S1P) receptor subtypes | | |
| S1P1 and S1P5 B cell | | |
| distrubution T cell | | |
| distribution) | | |
| BGC20-0134 (targets | BTG PLC | Oral |
| Proinflammatory and anti- | | |
| inflammatory cytokines) | | |
| BIIB033 (targets LINGO-1 | BIOGEN | Intravenous infusion used in Phase I and Phase II |
| (“leucine-rich repeat and | | trials Subcutaneous injection used in Phase I trial |
| immunoglobulin-like domain- | | |
| containing, Nogo receptor- | | |
| interacting protein”)) | | |
| Cladribine (targets CD4+ T | MERCK SERONO | Oral |
| cells DNA synthesis and | | |
| repair E-selectin Intracellular | | |
| adhesion molecule-1 Pro- | | |
| inflammatory cytokines | | |
| interleukin 2 and interleukin | | |
| 2R Pro-inflammatory | | |
| cytokines interleukin 8 and | | |
| RANTES Cytokine secretion | | |
| Monocyte and lymphocyte | | |
| migration) | | |
| Cyclophosphamide (targets | BAXTER HEALTHCARE | Oral, monthly intravenous pulses |
| T cells, particularly CD4+ | CORPORATION | |
| helper T cells B cells) | | |
| Daclizumab (humanized | BIOGEN IDEC/ABBVIE | Projected to be IM injection once monthly |
| monoclonal antibody | BIOTHERAPEUTICS | |
| targeting CD25 Immune | | |
| modulator of T cells) | | |
| Dalfampridine (targets | ACORDA THERAPEUTICS/ | One tablet every 12 hours (extended release), 10 |
| Voltage-gated potassium | BIOGEN IDEC | mg twice a day |
| channels | | |
| Degenerin/epithelial sodium | | |
| channels L-type calcium | | |
| channels that contain | | |
| subunit Cavbeta3) | | |
| Dronabinol (targets | ABBVIE INC. | Oral |
| Cannabinoid receptor CB1 | | |
| Cannabinoid receptor CB2) | | |
| Firategrast (targets | GLAXOSMITHKLINE | Oral |
| Alpha4beta1 integrin) | | |
| GNbAC1MSRV-Env (targets | GENEURO SA/SERVIER | Intravenous infusion |
| envelope protein of the MS- | | |
| associated retrovirus) | | |
| Idebenone (targets Reactive | SANTHERA | Oral Dose in clinical trial for PPMS is 2250 mg per |
| oxygen species) | PHARMACEUTICALS | day (750 mg dose, 3 times per day) |
| Imilecleucel-T (targets | OPEXA THERAPEUTICS/ | Subcutaneous Given 5 times per year, according |
| Myelin-specific, autoreactive | MERCK SERONO | to information from the manufacturer |
| T cells) | | |
| Laquinimod | TEVA | Projected to be 0.6 mg or 1.2 mg oral tablet taken |
| | | daily |
| Masitinib (targets KIT (a | AB SCIENCE | Oral |
| stem cell factor, also called | | |
| c-KIT) receptor as well as | | |
| select other tyrosine kinases | | |
| Mast cells) | | |
| MEDI-551 (targets CD19, a | MEDIMMUNE | Intravenous Subcutaneous |
| B cell-specific antigen that is | | |
| part of the B cell receptor | | |
| complex and that functions | | |
| in determining the threshold | | |
| for B cell activation B cells | | |
| Plasmablasts, B cells that | | |
| express CD19 (but not | | |
| CD20) and that secrete large | | |
| quantities of antibodies; | | |
| Phenytoin (targets Sodium | PFIZER | Intravenous Intramuscular (less favored option) |
| channels) | | Oral |
| Ponesimod | ACTELION | To be determined |
| Raltegravir (targets | MERCK | Oral 400 mg tablet twice daily, according to |
| Retroviral integrase | | information from the manufacturer |
| Herpesvirus DNA packaging | | |
| terminase) | | |
| RHB-104 | REDHILL BIOPHARMA | 95 mg clarithromycin, 45 mg rifabutin, and 10 mg |
| | LIMITED | clofazimine |
| Riluzole (targets | COVIS PHARMA/SANOFI | Oral |
| Glutamatergic | | |
| neurotransmission | | |
| Glutamate uptake and | | |
| release Voltage-gated | | |
| sodium channels Protein | | |
| kinase C) | | |

[0727] MS disease progression may be most intensive, and most damaging, at the earliest stages of disease progression. Accordingly, counter to many reimbursement policies and physician practice in light of, for example, costs and side effect mitigation, it may be most beneficial for a patient's long term disease status to begin treatment with the most intensive DMTs, for instance so-called second-line therapies. In some embodiments, a patient is treated with a regimen of the Fc-based chimeric protein complex in combination with a second-line therapy. Such a combination is used to reduce the side effect profile of one or more second-line therapies. In some embodiments, the combination is used to reduce dose of frequency of administration of one or more second-line therapies. For example, the doses of agents listed in the Table provided above may be reduced by about 50%, or about 40%, or about 30%, or about 25% in the context of the combination and the/or the frequency of dosing may be decreased to be half as often, or a third as often or may be reduced from, for example, daily to every other day or weekly, every other day to weekly or bi-weekly, weekly to bi-weekly or monthly, etc. Accordingly, in some embodiments, the Fc-based chimeric protein complex increase patient adherence by allowing for more convenient treatment regimens. Further, some DMTs have a suggested lifetime dose limitation e.g. for mitoxantrone, the lifetime cumulative dose should be strictly limited to 140 mg/m², or 2 to 3 years of therapy. In some embodiments, supplementation with the Fc-based chimeric protein complex preserves patient's access to mitoxantrone by allowing for lower or less frequent dosing with this DMT.

[0728] In some embodiments, the patient is a naive patient, who has not received treatment with one or more DMTs, and the Fc-based chimeric protein complex is used to buffer the side effects of a second-line therapy. Accordingly, the naive patient is able to benefit from the long-term benefits of a second-line therapy at disease outset. In some embodiments, the Fc-based chimeric protein complex is used as an entry therapy that precedes the use of a second-line therapy. For example, the Fc-based chimeric protein complex may be administered for an initial treatment period of about 3 months to stabilize disease and then the patient may be transitioned to a maintenance therapy of a second line agent.

[0729] It is generally believed that naive patients are more likely to respond to therapy as compared to patients that have received, and perhaps failed one or more DMT. In some embodiments, the Fc-based chimeric protein complex finds use in patients that have received, and perhaps failed one or more DMT. For example, in some embodiments, the Fc-based chimeric protein complex increases the therapeutic effect in patients that have received, and perhaps failed one or more DMT and may allow these patients to respond like naive patients.

[0730] In some embodiments, the patient has received or is receiving treatment with one or more DMTs and is not responding well. For example, the patient may be refractory or poorly responsive to one or more DMTs. In some embodiments, the patient is refractory, or poorly responsive to one or more of teriflunomide (AUBAGIO (GENZYME)); interferon beta-1a (AVONEX (BIOGEN IDEC); interferon beta-1b (BETASERON (BAYER HEALTHCARE PHARMACEUTICALS, INC.); glatiramer acetate (COPAXONE (TEVA NEUROSCIENCE); interferon beta-1b (EXTAVIA (NOVARTIS PHARMACEUTICALS CORP.); fingolimod (GILENYA (NOVARTIS PHARMACEUTICALS CORP.); alemtuzumab (LEMTRADA (GENZYME); mitoxantrone (NOVANTRONE (EMD SERONO); pegylated interferon beta-1a (PLEGRIDY (BIOGEN IDEC); interferon beta-1a (REBIF (EMD SERONO, INC.); dimethyl fumarate (BG-12) (TECFIDERA (BIOGEN IDEC); and natalizumab (TYSABRI (BIOGEN IDEC). In some embodiments, the one or more disclosed binding agent results in a therapeutic benefit of one or more DMTs in the patient and therefore reduces or eliminates the non-responsiveness to the DMT. For instance, this may spare the patient therapy with one or more DMTs at a higher dosing or frequency.

[0731] In patients with more aggressive disease, one approach is an induction treatment model, where a therapy with strong efficacy but strong safety concerns would be given first, followed by a maintenance therapy. An example of such a model might include initial treatment with alemtuzumab, followed by IFN-β, GA, or BG-12. In some embodiments, the one or more disclosed binding agent is used to prevent the need to switch therapies for maintenance. In some embodiments, the one or more disclosed binding agent is used to as maintenance therapy to one or more DMTs, including second line therapies. In some embodiments, the one or more disclosed binding agent is used to as first therapy in an induction, followed by another DMT as a maintenance therapy—such as, for example, a first line therapy.

[0732] In some embodiments, the one or more disclosed binding agent may be administered for an initial treatment period of about 3 months to stabilize disease and then the patient may be transitioned to a maintenance therapy of a first line agent.

[0733] In various embodiments, the one or more disclosed binding agent is used to reduce one or more side effects of a DMT, including without limitation any agent disclosed herein. For example, the one or more disclosed binding agent may be used in a regimen that allows dose sparing for one or more DMTs and therefore results in fewer side effects. For example, in some embodiments, the one or more disclosed binding agent may reduce one or more side effects of AUBAGIO or related agents, which may include hair thinning, diarrhea, flu, nausea, abnormal liver tests and unusual numbness or tingling in the hands or feet (paresthesias), levels of white blood cells, which can increase the risk of infections; increase in blood pressure; and severe liver damage. In some embodiments, the one or more disclosed binding agent may reduce one or more side effects of AVONEX or related agents which include flu-like symptoms following injection, depression, mild anemia, liver abnormalities, allergic reactions, and heart problems. In some embodiments, the one or more disclosed binding agent may reduce one or more side effects of BETASERON or related agents which include flu-like symptoms following injection, injection site reactions, allergic reactions, depression, liver abnormalities, and low white blood cell counts. In some embodiments, the one or more disclosed binding agent may reduce one or more side effects of COPAXONE or related agents which include injection site reactions, vasodilation (dilation of blood vessels); chest pain; a reaction immediately after injection, which includes anxiety, chest pain, palpitations, shortness of breath, and flushing. In some embodiments, the one or more disclosed binding agent may reduce one or more side effects of EXTAVIA or related agents which include flu-like symptoms following injection, injection site reactions, allergic reactions, depression, liver abnormalities, and low white blood cell counts. In some embodiments, the one or more disclosed binding agent may reduce one or more side effects of GILENYA or related agents which include headache, flu, diarrhea, back pain, liver enzyme elevations, cough, slowed heart rate following first dose, infections, and swelling in the eye. In some embodiments, the one or more disclosed binding agent may reduce one or more side effects of LEMTRADA or related agents which include rash, headache, fever, nasal congestion, nausea, urinary tract infection, fatigue, insomnia, upper respiratory tract infection, hives, itching, thyroid gland disorders, fungal Infection, pain in joints, extremities and back, diarrhea, vomiting, flushing, and infusion reactions (including nausea, hives, itching, insomnia, chills, flushing, fatigue, shortness of breath, changes in the sense of taste, indigestion, dizziness, pain). In some embodiments, the one or more disclosed binding agent may reduce one or more side effects of NOVANTRONE or related agents which include blue-green urine 24 hours after administration; infections, bone marrow suppression (fatigue, bruising, low blood cell counts), nausea, hair thinning, bladder infections, mouth sores, and serious liver and heart damage. In some embodiments, the one or more disclosed binding agent may reduce one or more side effects of PLEGRIDY or related agents which include flu-like symptoms following injection, injection site reactions, depression, mild anemia, liver abnormalities, allergic reactions, and heart problems. In some embodiments, the one or more disclosed binding agent may reduce one or more side effects of REBIF or related agents which include flu-like symptoms following injection, injection site reactions, liver abnormalities, depression, allergic reactions, and low red or white blood cell counts. In some embodiments, one or more disclosed binding agent may reduce one or more side effects of TECFIDERA or related agents which include flushing (sensation of heat or itching and a blush on the skin), gastrointestinal issues (nausea, diarrhea, abdominal pain), rash, protein in the urine, elevated liver enzymes; and reduction in blood lymphocyte (white blood cell) counts. In some embodiments, the one or more disclosed binding agent may reduce one or more side effects of TYSABRI or related agents which include headache, fatigue, urinary tract infections, depression, respiratory tract infections, joint pain, upset stomach, abdominal discomfort, diarrhea, vaginitis, pain in the arms or legs, rash, allergic or hypersensitivity reactions within two hours of infusion (dizziness, fever, rash, itching, nausea, flushing, low blood pressure, difficulty breathing, chest pain).

[0734] In some embodiments, the present invention relates to combination therapy with one or more chimeric agents described in WO 2013/10779, WO 2015/007536, WO 2015/007520, WO 2015/007542, and WO 2015/007903, the entire contents of which are hereby incorporated by reference in their entireties.

[0735] In some embodiments, inclusive of, without limitation, infectious disease applications, the present invention pertains to anti-infectives as additional therapeutic agents. In some embodiments, the anti-infective is an anti-viral agent including, but not limited to, Abacavir, Acyclovir, Adefovir, Amprenavir, Atazanavir, Cidofovir, Darunavir, Delavirdine, Didanosine, Docosanol, Efavirenz, Elvitegravir, Emtricitabine, Enfuvirtide, Etravirine, Famciclovir, and Foscarnet. In some embodiments, the anti-infective is an anti-bacterial agent including, but not limited to, cephalosporin antibiotics (cephalexin, cefuroxime, cefadroxil, cefazolin, cephalothin, cefaclor, cefamandole, cefoxitin, cefprozil, and ceftobiprole); fluoroquinolone antibiotics (cipro, Levaquin, floxin, tequin, avelox, and norflox); tetracycline antibiotics (tetracycline, minocycline, oxytetracycline, and doxycycline); penicillin antibiotics (amoxicillin, ampicillin, penicillin V, dicloxacillin, carbenicillin, vancomycin, and methicillin); monobactam antibiotics (aztreonam); and carbapenem antibiotics (ertapenem, doripenem, imipenem/cilastatin, and meropenem). In some embodiments, the anti-infectives include anti-malarial agents (e.g., chloroquine, quinine, mefloquine, primaquine, doxycycline, artemether/lumefantrine, atovaquone/proguanil and sulfadoxine/pyrimethamine), metronidazole, tinidazole, ivermectin, pyrantel pamoate, and albendazole.

[0736] In some embodiments, inclusive, without limitation, of autoimmmune applications, the additional therapeutic agent is an immunosuppressive agent. In some embodiments, the immunosuppressive agent is an anti-inflammatory agent such as a steroidal anti-inflammatory agent or a non-steroidal anti-inflammatory agent (NSAID). Steroids, particularly the adrenal corticosteroids and their synthetic analogues, are well known in the art. Examples of corticosteroids useful in the present invention include, without limitation, hydroxyltriamcinolone, alpha-methyl dexamethasone, beta-methyl betamethasone, beclomethasone dipropionate, betamethasone benzoate, betamethasone dipropionate, betamethasone valerate, clobetasol valerate, desonide, desoxymethasone, dexamethasone, diflorasone diacetate, diflucortolone valerate, fluadrenolone, fluclorolone acetonide, flumethasone pivalate, fluosinolone acetonide, fluocinonide, flucortine butylester, fluocortolone, fluprednidene (fluprednylidene) acetate, flurandrenolone, halcinonide, hydrocortisone acetate, hydrocortisone butyrate, methylprednisolone, triamcinolone acetonide, cortisone, cortodoxone, flucetonide, fludrocortisone, difluorosone diacetate, fluradrenolone acetonide, medrysone, amcinafel, amcinafide, betamethasone and the balance of its esters, chloroprednisone, clocortelone, clescinolone, dichlorisone, difluprednate, flucloronide, flunisolide, fluoromethalone, fluperolone, fluprednisolone, hydrocortisone, meprednisone, paramethasone, prednisolone, prednisone, beclomethasone dipropionate. (NSAIDS) that may be used in the present invention, include but are not limited to, salicylic acid, acetyl salicylic acid, methyl salicylate, glycol salicylate, salicylmides, benzyl-2,5-diacetoxybenzoic acid, ibuprofen, fulindac, naproxen, ketoprofen, etofenamate, phenylbutazone, and indomethacin. In some embodiments, the immunosupressive agent may be cytostatics such as alkylating agents, antimetabolites (e.g., azathioprine, methotrexate), cytotoxic antibiotics, antibodies (e.g., basiliximab, daclizumab, and muromonab), anti-immunophilins (e.g., cyclosporine, tacrolimus, sirolimus), inteferons, opioids, TNF binding proteins, mycophenolates, and small biological agents (e.g., fingolimod, myriocin). Additional anti-inflammatory agents are described, for example, in U.S. Pat. No. 4,537,776, the entire contents of which is incorporated by reference herein.

[0737] In some embodiments, the Fc-based chimeric protein complex described herein, include derivatives that are modified, i.e., by the covalent attachment of any type of molecule to the composition such that covalent attachment does not prevent the activity of the composition. For example, but not by way of limitation, derivatives include composition that have been modified by, inter alia, glycosylation, lipidation, acetylation, pegylation, phosphorylation, amidation, derivatization by known protecting/blocking groups, proteolytic cleavage, linkage to a cellular ligand or other protein, etc. Any of numerous chemical modifications can be carried out by known techniques, including, but not limited to specific chemical cleavage, acetylation, formylation, metabolic synthesis of tunicamycin, etc.

[0738] In still other embodiments, the Fc-based chimeric protein complex described herein further comprise a cytotoxic agent, comprising, in illustrative embodiments, a toxin, a chemotherapeutic agent, a radioisotope, and an agent that causes apoptosis, necrosis or any other form of cell death. Such agents may be conjugated to a composition described herein.

[0739] The Fc-based chimeric protein complex described herein may thus be modified post-translationally to add effector moieties such as chemical linkers, detectable moieties such as for example fluorescent dyes, enzymes, substrates, bioluminescent materials, radioactive materials, and chemiluminescent moieties, or functional moieties such as for example streptavidin, avidin, biotin, a cytotoxin, a cytotoxic agent, and radioactive materials.

[0740] Illustrative cytotoxic agents include, but are not limited to, methotrexate, aminopterin, 6-mercaptopurine, 6-thioguanine, cytarabine, 5-fluorouracil decarbazine; alkylating agents such as mechlorethamine, thioepa chlorambucil, melphalan, carmustine (BSNU), mitomycin C, lomustine (CCNU), 1-methylnitrosourea, cyclothosphamide, mechlorethamine, busulfan, dibromomannitol, streptozotocin, mitomycin C, cis-dichlorodiamine platinum (II) (DDP) cisplatin and carboplatin (paraplatin); anthracyclines include daunorubicin (formerly daunomycin), doxorubicin (adriamycin), detorubicin, carminomycin, idarubicin, epirubicin, mitoxantrone and bisantrene; antibiotics include dactinomycin (actinomycin D), bleomycin, calicheamicin, mithramycin, and anthramycin (AMC); and antimytotic agents such as the vinca alkaloids, vincristine and vinblastine. Other cytotoxic agents include paclitaxel (taxol), ricin, pseudomonas exotoxin, gemcitabine, cytochalasin B, gramicidin D, ethidium bromide, emetine, etoposide, tenoposide, colchicin, dihydroxy anthracin dione, 1-dehydrotestosterone, glucocorticoids, procaine, tetracaine, lidocaine, propranolol, puromycin, procarbazine, hydroxyurea, asparaginase, corticosteroids, mytotane (O,P′-(DDD)), interferons, and mixtures of these cytotoxic agents.

[0741] Further cytotoxic agents include, but are not limited to, chemotherapeutic agents such as carboplatin, cisplatin, paclitaxel, gemcitabine, calicheamicin, doxorubicin, 5-fluorouracil, mitomycin C, actinomycin D, cyclophosphamide, vincristine, bleomycin, VEGF antagonists, EGFR antagonists, platins, taxols, irinotecan, 5-fluorouracil, gemcytabine, leucovorine, steroids, cyclophosphamide, melphalan, vinca alkaloids (e.g., vinblastine, vincristine, vindesine and vinorelbine), mustines, tyrosine kinase inhibitors, radiotherapy, sex hormone antagonists, selective androgen receptor modulators, selective estrogen receptor modulators, PDGF antagonists, TNF antagonists, IL-1p antagonists, interleukins (e.g. IL-12 or IL-2), IL-12R antagonists, Toxin conjugated monoclonal antibodies, tumor antigen specific monoclonal antibodies, Erbitux, Avastin, Pertuzumab, anti-CD20 antibodies, Rituxan, ocrelizumab, ofatumumab, DXL625, HERCEPTIN®, or any combination thereof. Toxic enzymes from plants and bacteria such as ricin, diphtheria toxin and Pseudomonas toxin may be conjugated to the therapeutic agents (e.g. antibodies) to generate cell-type-specific-killing reagents (Youle, et al., Proc. Nat'l Acad. Sci. USA 77:5483 (1980); Gilliland, et al., Proc. Nat'l Acad. Sci. USA 77:4539 (1980); Krolick, et al., Proc. Nat'l Acad. Sci. USA 77:5419 (1980)).

[0742] Other cytotoxic agents include cytotoxic ribonucleases as described by Goldenberg in U.S. Pat. No. 6,653,104. Embodiments of the invention also relate to radioimmunoconjugates where a radionuclide that emits alpha or beta particles is stably coupled to the Fc-based chimeric protein complex, with or without the use of a complex-forming agent. Such radionuclides include beta-emitters such as Phosphorus-32, Scandium-47, Copper-67, Gallium-67, Yttrium-88, Yttrium-90, Iodine-125, Iodine-131, Samarium-153, Lutetium-177, Rhenium-186 or Rhenium-188, and alpha-emitters such as Astatine-211, Lead-212, Bismuth-212, Bismuth-213 or Actinium-225.

[0743] Illustrative detectable moieties further include, but are not limited to, horseradish peroxidase, acetylcholinesterase, alkaline phosphatase, beta-galactosidase and luciferase. Further illustrative fluorescent materials include, but are not limited to, rhodamine, fluorescein, fluorescein isothiocyanate, umbelliferone, dichlorotriazinylamine, phycoerythrin and dansyl chloride. Further illustrative chemiluminescent moieties include, but are not limited to, luminol. Further illustrative bioluminescent materials include, but are not limited to, luciferin and aequorin. Further illustrative radioactive materials include, but are not limited to, Iodine-125, Carbon-14, Sulfur-35, Tritium and Phosphorus-32.

### Methods of Treatment

[0744] Methods and compositions described herein have application to treating various diseases and disorders, including, but not limited to cancer, infections, immune disorders, and inflammatory diseases or conditions.

[0745] Further, any of the present agents may be for use in the treating, or the manufacture of a medicament for treating, various diseases and disorders, including, but not limited to cancer, infections, immune disorders, inflammatory diseases or conditions, and autoimmune diseases.

[0746] In some embodiments, the present invention relates to the treatment of, or a patient having cancer. As used herein, cancer refers to any uncontrolled growth of cells that may interfere with the normal functioning of the bodily organs and systems, and includes both primary and metastatic tumors. Primary tumors or cancers that migrate from their original location and seed vital organs can eventually lead to the death of the subject through the functional deterioration of the affected organs. A metastasis is a cancer cell or group of cancer cells, distinct from the primary tumor location, resulting from the dissemination of cancer cells from the primary tumor to other parts of the body. Metastases may eventually result in death of a subject. For example, cancers can include benign and malignant cancers, polyps, hyperplasia, as well as dormant tumors or micrometastases.

[0747] Illustrative cancers that may be treated include, but are not limited to, basal cell carcinoma, biliary tract cancer; bladder cancer; bone cancer; brain and central nervous system cancer; breast cancer; cancer of the peritoneum; cervical cancer; choriocarcinoma; colon and rectum cancer; connective tissue cancer; cancer of the digestive system; endometrial cancer; esophageal cancer; eye cancer; cancer of the head and neck; gastric cancer (including gastrointestinal cancer); glioblastoma; hepatic carcinoma; hepatoma; intra-epithelial neoplasm; kidney or renal cancer; larynx cancer; leukemia; liver cancer; lung cancer (e.g., small-cell lung cancer, non-small cell lung cancer, adenocarcinoma of the lung, and squamous carcinoma of the lung); melanoma; myeloma; neuroblastoma; oral cavity cancer (lip, tongue, mouth, and pharynx); ovarian cancer; pancreatic cancer; prostate cancer; retinoblastoma; rhabdomyosarcoma; rectal cancer; cancer of the respiratory system; salivary gland carcinoma; sarcoma; skin cancer; squamous cell cancer; stomach cancer; testicular cancer; thyroid cancer; uterine or endometrial cancer; cancer of the urinary system; vulval cancer; lymphoma including Hodgkin's and non-Hodgkin's lymphoma, as well as B-cell lymphoma (including low grade/follicular non-Hodgkin's lymphoma (NHL); small lymphocytic (SL) NHL; intermediate grade/follicular NHL; intermediate grade diffuse NHL; high grade immunoblastic NHL; high grade lymphoblastic NHL; high grade small non-cleaved cell NHL; bulky disease NHL; mantle cell lymphoma; AIDS-related lymphoma; and Waldenstrom's Macroglobulinemia; chronic lymphocytic leukemia (CLL); acute lymphoblastic leukemia (ALL); acute myeloid leukemia (AML); Hairy cell leukemia; chronic myeloblastic leukemia; as well as other carcinomas and sarcomas; and post-transplant lymphoproliferative disorder (PTLD), as well as abnormal vascular proliferation associated with phakomatoses, edema (e.g. that associated with brain tumors), and Meigs' syndrome.

[0748] In various embodiments, the present invention provides Fc-based chimeric protein complexes which comprise wild type or modified human IFNγ or human TNFα signaling agents for the treatment of cancer. In some embodiments, the Fc-based chimeric protein complexes of the invention significantly reduce and/or eliminate tumors. In some embodiments, the present Fc-based chimeric protein complexes significant reduce and/or eliminate tumors when administered to a subject in combination with other anti-cancer agents such as chemotherapeutic agents, checkpoint inhibitors, and immunosuppressive agents. In various embodiments, the combination of Fc-based chimeric protein complexes and other anti-cancer agents synergistically reduced tumor size and/or eliminated tumor cells.

[0749] In various embodiments, the present invention relates to cancer combination therapies with an Fc-based chimeric protein complex comprising one or more targeting moieties and one or more wild type or modified human IFNγ or human TNFα signaling agents. Accordingly, the present invention provides for an Fc-based chimeric protein complex that include, for example, a targeting moiety and one or more human IFNγ or human TNFα signaling agents and uses thereof in combination with anti-cancer agents.

[0750] For instance, in various embodiments, the present invention pertains to combination therapies for cancer involving Fc-based chimeric protein complex and a wild type or modified human IFNγ or human TNFα signaling agent.

[0751] In other embodiments, the present Fc-based chimeric protein complex comprises multiple targeting moieties and therefore be present in bispecific or trispecific formats. For instance, in various embodiments, the present invention pertains to combination therapies for cancer involving an Fc-based chimeric protein complex and a checkpoint inhibitor binding agent (e.g. anti-PD-L1, anti-PD-1, anti-PD-L2, or anti-CTLA) described herein and a modified human IFNγ or human TNFα signaling agent.

[0752] In various embodiments, the human IFNγ or human TNFα signaling agent is wild type or modified to have reduced affinity or activity for one or more of its receptors, which allows for attenuation of activity (inclusive of agonism or antagonism) and/or prevents non-specific signaling or undesirable sequestration of the chimeric protein. In some embodiments, the reduced affinity or activity at the receptor is restorable by inclusion in the present complex having one or more of the targeting moieties as described herein.

[0753] In some embodiments, the present invention relates to the treatment of, or a patient having a microbial infection and/or chronic infection. Illustrative infections include, but are not limited to, HIV/AIDS, tuberculosis, osteomyelitis, hepatitis B, hepatitis C, Epstein-Barr virus or parvovirus, T cell leukemia virus, bacterial overgrowth syndrome, fungal or parasitic infections.

[0754] In some embodiments, the present invention relates to the treatment of, or a patient having one or more of chronic granulomatous disease, osteopetrosis, idiopathic pulmonary fibrosis, Friedreich's ataxia, atopic dermatitis, Chagas disease, cancer, heart failure, autoimmune disease, sickle cell disease, thalassemia, blood loss, transfusion reaction, diabetes, vitamin B12 deficiency, collagen vascular disease, Shwachman syndrome, thrombocytopenic purpura, Celiac disease, endocrine deficiency state such as hypothyroidism or Addison's disease, autoimmune disease such as Crohn's Disease, systemic lupus erythematosis, rheumatoid arthritis or juvenile rheumatoid arthritis, ulcerative colitis immune disorders such as eosinophilic fasciitis, hypoimmunoglobulinemia, or thymoma/thymic carcinoma, graft versus host disease, preleukemia, Nonhematologic syndrome (e.g. Down's, Dubowwitz, Seckel), Felty syndrome, hemolytic uremic syndrome, myelodysplasic syndrome, nocturnal paroxysmal hemoglobinuria, osteomyelofibrosis, pancytopenia, pure red-cell aplasia, Schoenlein-Henoch purpura, malaria, protein starvation, menorrhagia, systemic sclerosis, liver cirrhosis, hypometabolic states, and congestive heart failure.

[0755] In some embodiments, the present invention relates to the treatment of, or a patient having one or more of chronic granulomatous disease, osteopetrosis, idiopathic pulmonary fibrosis, Friedreich's ataxia, atopic dermatitis, Chagas disease, mycobacterial infections, cancer, scleroderma, hepatitis, hepatitis C, septic shock, and rheumatoid arthritis.

[0756] In various embodiments, the present compositions are used to treat or prevent one or more inflammatory diseases or conditions, such as inflammation, acute inflammation, chronic inflammation, respiratory disease, atherosclerosis, restenosis, asthma, allergic rhinitis, atopic dermatitis, septic shock, rheumatoid arthritis, inflammatory bowel disease, inflammatory pelvic disease, pain, ocular inflammatory disease, celiac disease, Leigh Syndrome, Glycerol Kinase Deficiency, Familial eosinophilia (FE), autosomal recessive spastic ataxia, laryngeal inflammatory disease; Tuberculosis, Chronic cholecystitis, Bronchiectasis, Silicosis and other pneumoconioses.

[0757] In various embodiments, the present invention has application to treating autoimmune and/or neurodegenerative diseases.

[0758] In various embodiments, the present compositions are used to treat or prevent one or more conditions characterized by undesirable CTL activity, and/or a conditions characterized by high levels of cell death. For instance, in various embodiments, the present compositions are used to treat or prevent one or more conditions associated with uncontrolled or overactive immune response.

[0759] In various embodiments, the present compositions are used to treat or prevent one or more autoimmune and/or neurodegenerative diseases or conditions, such as MS, diabetes mellitus, lupus, celiac disease, Crohn's disease, ulcerative colitis, Guillain-Barre syndrome, scleroderms, Goodpasture's syndrome, Wegener's granulomatosis, autoimmune epilepsy, Rasmussen's encephalitis, Primary biliary sclerosis, Sclerosing cholangitis, Autoimmune hepatitis, Addison's disease, Hashimoto's thyroiditis, Fibromyalgia, Menier's syndrome; transplantation rejection (e.g., prevention of allograft rejection) pernicious anemia, rheumatoid arthritis, systemic lupus erythematosus, dermatomyositis, Sjogren's syndrome, lupus erythematosus, myasthenia gravis, Reiter's syndrome, Grave's disease, and other autoimmune diseases.

[0760] In various embodiments, the present invention is used to treat or prevent various autoimmune and/or neurodegenerative diseases. In some embodiments, the autoimmune and/or neurodegenerative diseases selected from MS (including without limitation the subtypes described herein), Alzheimer's disease (including, without limitation, Early-onset Alzheimer's, Late-onset Alzheimer's, and Familial Alzheimer's disease (FAD), Parkinson's disease and parkinsonism (including, without limitation, Idiopathic Parkinson's disease, Vascular parkinsonism, Drug-induced parkinsonism, Dementia with Lewy bodies, Inherited Parkinson's, Juvenile Parkinson's), Huntington's disease, Amyotrophic lateral sclerosis (ALS, including, without limitation, Sporadic ALS, Familial ALS, Western Pacific ALS, Juvenile ALS, Hiramaya Disease).

[0761] In an embodiment, the present invention provides methods for the treatment or prevention of one or more liver disorders, selected from viral hepatitis, alcohol hepatitis, autoimmune hepatitis, alcohol liver disease, fatty liver disease, steatosis, steatohepatitis, non-alcohol fatty liver disease, drug-induced liver disease, cirrhosis, fibrosis, liver failure, drug induced liver failure, metabolic syndrome, hepatocellular carcinoma, cholangiocarcinoma, primary biliary cirrhosis (primary biliary cholangitis), bile capillaries, Gilbert's syndrome, jaundice, and any other liver toxicity-associated indication. In some embodiments, the present invention provides methods for the treatment or prevention of liver fibrosis. In some embodiments, the present invention provides methods for the treatment or prevention of primary sclerosing cholangitis (PSC), chronic liver disease, nonalcoholic fatty liver disease (NAFLD), nonalcoholic steatohepatitis (NASH), hepatitis C infection, alcoholic liver disease, liver damage, optionally due to progressive fibrosis and liver fibrosis. In some embodiments, the present invention provides methods for the treatment or prevention of nonalcoholic steatohepatitis (NASH). In some embodiments, the present invention provides methods that reduce or prevent fibrosis. In some embodiments, the present invention provides methods that reduce or prevent cirrhosis. In some embodiments, the present invention provides methods that reduce or prevent hepatocellular carcinoma.

[0762] In various embodiments, the present invention provides methods for the treatment or prevention of cardiovascular disease, such as a disease or condition affecting the heart and vasculature, including but not limited to, coronary heart disease (CHD), cerebrovascular disease (CVD), aortic stenosis, peripheral vascular disease, atherosclerosis, arteriosclerosis, myocardial infarction (heart attack), cerebrovascular diseases (stroke), transient ischaemic attacks (TIA), angina (stable and unstable), atrial fibrillation, arrhythmia, valvular disease, and/or congestive heart failure. In various embodiments, the present invention provides methods for the treatment or prevention of cardiovascular disease which involves inflammation.

[0763] In various embodiments, the present invention provides methods for the treatment or prevention of one or more respiratory diseases, such as asthma, chronic obstructive pulmonary disease (COPD), bronchiectasis, allergic rhinitis, sinusitis, pulmonary vasoconstriction, inflammation, allergies, impeded respiration, respiratory distress syndrome, cystic fibrosis, pulmonary hypertension, pulmonary vasoconstriction, emphysema, Hantavirus pulmonary syndrome (HPS), Loeffler's syndrome, Goodpasture's syndrome, Pleurisy, pneumonitis, pulmonary edema, pulmonary fibrosis, Sarcoidosis, complications associated with respiratory syncitial virus infection, and other respiratory diseases.

[0764] In various embodiments, the present invention is used to treat or prevent MS. In various embodiments, the Fc-based chimeric protein complexes as described herein are used to eliminate and reduce multiple MS symptoms. Illustrative symptoms associated with multiple sclerosis, which can be prevented or treated with the compositions and methods described herein, include: optic neuritis, diplopia, nystagmus, ocular dysmetria, internuclear ophthalmoplegia, movement and sound phosphenes, afferent pupillary defect, paresis, monoparesis, paraparesis, hemiparesis, quadraparesis, plegia, paraplegia, hemiplegia, tetraplegia, quadraplegia, spasticity, dysarthria, muscle atrophy, spasms, cramps, hypotonia, clonus, myoclonus, myokymia, restless leg syndrome, footdrop, dysfunctional reflexes, paraesthesia, anaesthesia, neuralgia, neuropathic and neurogenic pain, l'hermitte's sign, proprioceptive dysfunction, trigeminal neuralgia, ataxia, intention tremor, dysmetria, vestibular ataxia, vertigo, speech ataxia, dystonia, dysdiadochokinesia, frequent micturation, bladder spasticity, flaccid bladder, detrusor-sphincter dyssynergia, erectile dysfunction, anorgasmy, frigidity, constipation, fecal urgency, fecal incontinence, depression, cognitive dysfunction, dementia, mood swings, emotional lability, euphoria, bipolar syndrome, anxiety, aphasia, dysphasia, fatigue, Uhthoff's symptom, gastroesophageal reflux, and sleeping disorders. Mitigation or amelioration or one more of these symptoms in a subject can be achieved by the one or more agent as described herein.

[0765] In various embodiments, the Fc-based chimeric protein complexes as described herein is used to treat or prevent clinically isolated syndrome (CIS). A clinically isolated syndrome (CIS) is a single monosymptomatic attack compatible with MS, such as optic neuritis, brain stem symptoms, and partial myelitis. Patients with CIS that experience a second clinical attack are generally considered to have clinically definite multiple sclerosis (CDMS). Over 80 percent of patients with CIS and MRI lesions go on to develop MS, while approximately 20 percent have a self-limited process. Patients who experience a single clinical attack consistent with MS may have at least one lesion consistent with multiple sclerosis prior to the development of clinically definite multiple sclerosis. In various embodiments, the presently described Fc-based chimeric protein complexes is used to treat CIS so it does not develop into MS, including, for example RRMS.

[0766] In various embodiments, the Fc-based chimeric protein complexes as described herein are used to treat or prevent radiologically isolated syndrome (RIS). In RIS, incidental imaging findings suggest inflammatory demyelination in the absence of clinical signs or symptoms. In various embodiments, the Fc-based chimeric protein complex is used to treat RIS so it does not develop into MS, including, for example RRMS.

[0767] In various embodiments, the Fc-based chimeric protein complexes as described herein are used to treat one or more of benign multiple sclerosis; relapsing-remitting multiple sclerosis (RRMS); secondary progressive multiple sclerosis (SPMS); progressive relapsing multiple sclerosis (PRMS); and primary progressive multiple sclerosis (PPMS).

[0768] Benign multiple sclerosis is a retrospective diagnosis which is characterized by 1-2 exacerbations with complete recovery, no lasting disability and no disease progression for 10-15 years after the initial onset. Benign multiple sclerosis may, however, progress into other forms of multiple sclerosis. In various embodiments, the Fc-based chimeric protein complex is used to treat benign multiple sclerosis so it does not develop into MS.

[0769] Patients suffering from RRMS experience sporadic exacerbations or relapses, as well as periods of remission. Lesions and evidence of axonal loss may or may not be visible on MRI for patients with RRMS. In various embodiments, the Fc-based chimeric protein complexes as described herein are used to treat RRMS. In some embodiments, RRMS includes patients with RRMS; patients with SPMS and superimposed relapses; and patients with CIS who show lesion dissemination on subsequent MRI scans according to McDonald's criteria. A clinical relapse, which may also be used herein as “relapse,” “confirmed relapse,” or “clinically defined relapse,” is the appearance of one or more new neurological abnormalities or the reappearance of one or more previously observed neurological abnormalities. This change in clinical state must last at least 48 hours and be immediately preceded by a relatively stable or improving neurological state of at least 30 days. In some embodiments, an event is counted as a relapse when the subject's symptoms are accompanied by observed objective neurological changes, consistent with an increase of at least 1.00 in the Expanded Disability Status Scale (EDSS) score or one grade in the score of two or more of the seven FS or two grades in the score of one of FS as compared to the previous evaluation.

[0770] SPMS may evolve from RRMS. Patients afflicted with SPMS have relapses, a diminishing degree of recovery during remissions, less frequent remissions and more pronounced neurological deficits than RRMS patients. Enlarged ventricles, which are markers for atrophy of the corpus callosum, midline center and spinal cord, are visible on MRI of patients with SPMS. In various embodiments, the Fc-based chimeric protein complexes as described herein is used to treat RRMS so it does not develop into SPMS.

[0771] PPMS is characterized by a steady progression of increasing neurological deficits without distinct attacks or remissions. Cerebral lesions, diffuse spinal cord damage and evidence of axonal loss are evident on the MRI of patients with PPMS. PPMS has periods of acute exacerbations while proceeding along a course of increasing neurological deficits without remissions. Lesions are evident on MRI of patients suffering from PRMS. In various embodiments, the Fc-based chimeric protein complex as described herein is used to treat RRMS and/or SPMS so it does not develop into PPMS.

[0772] In some embodiments, the Fc-based chimeric protein complexes as described herein are used in a method of treatment of relapsing forms of MS. In some embodiments, the Fc-based chimeric protein complex is used in a method of treatment of relapsing forms of MS to slow the accumulation of physical disability and/or reduce the frequency of clinical exacerbations, and, optionally, for patients who have experienced a first clinical episode and have MRI features consistent with MS. In some embodiments, the Fc-based chimeric protein complexes as described herein are used in a method of treatment of worsening relapsing-remitting MS, progressive-relapsing MS or secondary-progressive MS to reduce neurologic disability and/or the frequency of clinical exacerbations. In some embodiments, the Fc-based chimeric protein complexes reduce the frequency and/or severity of relapses.

[0773] In some embodiments, the Fc-based chimeric protein complexes are used in a method of treatment of relapsing forms of MS in patients who have had an inadequate response to (or are refractory to) one, or two, or three, or four, or five, or six, or seven, or eight, or nine, or ten or more disease modifying therapies (DMTs).

[0774] In various embodiments, the subject's symptoms may be assessed quantitatively, such as by EDSS, or decrease in the frequency of relapses, or increase in the time to sustained progression, or improvement in the magnetic resonance imaging (MRI) behavior in frequent, serial MRI studies and compare the patient's status measurement before and after treatment. In a successful treatment, the patient status will have improved (e.g., the EDSS measurement number or frequency of relapses will have decreased, or the time to sustained progression will have increased, or the MRI scans will show less pathology).

[0775] In some embodiments, the patient can be evaluated, e.g., before, during or after receiving the Fc-based chimeric protein complexes e.g., for indicia of responsiveness. Various clinical or other indicia of effectiveness of treatment, e.g., EDSS score; MRI scan; relapse number, rate, or severity; multiple sclerosis functional composite (MSFC); multiple sclerosis quality of life inventory (MSQLI); Paced Serial Addition Test (PASAT); symbol digit modalities test (SDMT); 25-foot walk test; 9-hole peg test; low contrast visual acuity; Modified Fatigue Impact Scale; expanded disability status score (EDSS); multiple sclerosis functional composite (MSFC); Beck Depression Inventory; and 7/24 Spatial Recall Test can be used. In various embodiments, the Fc-based chimeric protein complexes cause an improvement in one or more of these measures. Further, the patient can be monitored at various times during a regimen. In some embodiments, the Fc-based chimeric protein complexes cause a disease improvement as assessed by MacDonald dissemination in space and time. For example, for dissemination in space, lesion imaging, such as, by way of illustration, Barkhof-Tintore MR imaging criteria, may be used, including at least one gadolinium-enhancing lesion or 9 T2 hyperintense lesions; at least one infratentorial lesion; at least one juxtacortical lesion; at least about three periventricular lesions; and a spinal cord lesion. For dissemination in time, MRI can also be used; for example, if an MRI scan of the brain performed at >3 months after an initial clinical event demonstrates a new gadolinium-enhancing lesion, this may indicate a new CNS inflammatory event, because the duration of gadolinium enhancement in MS is usually less than 6 weeks. If there are no gadolinium-enhancing lesions but a new T2 lesion (presuming an MRI at the time of the initial event), a repeat MR imaging scan after another 3 months may be needed with demonstration of a new T2 lesion or gadolinium-enhancing lesion.

[0776] In some embodiments, disease effects are assessed using any of the measures described in Lavery, et al. Multiple Sclerosis International, Vol 2014 (2014), Article ID 262350, the entire contents of which are hereby incorporated by reference.

[0777] In some embodiments, the Fc-based chimeric protein complex results in one or more of: (a) prevention of worsening in disability defined as deterioration by 1.0 point on EDSS, (b) increase in time to relapse, (c) reduction or stabilization of number and/or volume of gadolinium enhancing lesions, (d) decreased annualized relapse rate, (e) increased relapse duration and severity by NRS score, (f) decrease in disease activity as measured by MRI (annual rate of new or enlarging lesions), (g) lower average number of relapses at 1 year, or 2 years, (h) sustained disease progression as measured by the EDSS at 3 months, (i) prevention of conversion to CDMS, (j) no or few new or enhancing T2 lesions, (k) minimal change in hyperintense T2 lesion volume, (l) increased time to McDonald defined MS, (m) prevention of progression of disability as measured by sustained worsening of EDSS at 12 weeks, (n) reduction in time to relapse at 96 weeks, and (o) reduction or stabilization of brain atrophy (e.g. percentage change from baseline).

[0778] In one embodiment, the Fc-based chimeric protein complexes are administered and is effective to result in a decreased rate of relapse (e.g., at least 10%, 20%, 30%, 40%, 50%, 60%, 70%, 80% or greater reduction in rate of relapse) compared to the rate of relapse before administration (e.g., compared to the rate of relapse following administration for 12 months or for less than 12 months, e.g., about 10, or about 8, or about 4, or about 2 or less months) of treatment, or before commencement of treatment, when measured between 3-24 months (e.g., between 6-18 months, e.g., 12 months) after a previous relapse.

[0779] In one embodiment, the Fc-based chimeric protein complexes are administered and are effective to result in a prevention of an increase in EDSS score from a pre-treatment state. The Kurtzke Expanded Disability Status Scale (EDSS) is a method of quantifying disability in multiple sclerosis. The EDSS replaced the previous Disability Status Scales which used to bunch people with MS in the lower brackets. The EDSS quantifies disability in eight Functional Systems (FS) and allows neurologists to assign a Functional System Score (FSS) in each of these. The Functional Systems are: pyramidal, cerebellar, brainstem, sensory, bowel and bladder, visual and cerebral.

[0780] In one embodiment, the Fc-based chimeric protein complexes are administered and is effective to result in a decreased EDSS score (e.g., a decrease of 1, 1.5, 2, 2.5, 3 points or more, e.g., over at least three months, six months, one year, or longer) compared to the EDSS score following administration of the Fc-based chimeric protein complexes (e.g. for 12 months or for less than 12 months, e.g., less than 10, 8, 4 or less months, or before the commencement of treatment).

[0781] In one embodiment, the Fc-based chimeric protein complexes are administered and is effective to result in a decreased number of new lesions overall or of any one type (e.g., at least 10%, 20%, 30%, 40% decrease), compared to the number of new lesions following administration of the Fc-based chimeric protein complexes for 12 months or for less than 12 months, e.g., less than 10, 8, 4 or less months, or before commencement of treatment;

[0782] In one embodiment, the Fc-based chimeric protein complexes are administered and is effective to result in a decreased number of lesions overall or of any one type (e.g., at least 10%, 20%, 30%, 40% decrease), compared to the number of lesions following administration of the Fc-based chimeric protein complexes for 12 months or for less than 12 months, e.g., less than 10, 8, 4 or less months, or before commencement of treatment;

[0783] In one embodiment, the Fc-based chimeric protein complexes are administered and is effective to result in a reduced rate of appearance of new lesions overall or of any one type (e.g., at least 10%, 20%, 30%, 40% reduced rate), compared to the rate of appearance of new lesions following administration for 12 months or for less than 12 months, e.g., less than 10, 8, 4 or less months, or before commencement of treatment;

[0784] In one embodiment, the Fc-based chimeric protein complexes are administered and is effective to result in a reduced increase in lesion area overall or of any one type (e.g., at least 10%, 20%, 30%, 40% decreased increase), compared to an increase in lesion area following administration for 12 months or less than 12 months, e.g., less than 10, 8, 4 or less months, or before commencement of treatment.

[0785] In one embodiment, the Fc-based chimeric protein complexes are administered and is effective to result in a reduced incidence or symptom of optic neuritis (e.g., improved vision), compared to the incidence or symptom of optic neuritis following administration for 12 months or for less than 12 months, e.g., less than 10, 8, 4 or less months, or before commencement of treatment.

[0786] In various embodiments, methods of the invention are useful in treatment a human subject. In some embodiments, the human is a pediatric human. In other embodiments, the human is an adult human. In other embodiments, the human is a geriatric human. In other embodiments, the human may be referred to as a patient. In some embodiments, the human is a female. In some embodiments, the human is a male.

[0787] In certain embodiments, the human has an age in a range of from about 1 to about 18 months old, from about 18 to about 36 months old, from about 1 to about 5 years old, from about 5 to about 10 years old, from about 10 to about 15 years old, from about 15 to about 20 years old, from about 20 to about 25 years old, from about 25 to about 30 years old, from about 30 to about 35 years old, from about 35 to about 40 years old, from about 40 to about 45 years old, from about 45 to about 50 years old, from about 50 to about 55 years old, from about 55 to about 60 years old, from about 60 to about 65 years old, from about 65 to about 70 years old, from about 70 to about 75 years old, from about 75 to about 80 years old, from about 80 to about 85 years old, from about 85 to about 90 years old, from about 90 to about 95 years old or from about 95 to about 100 years old. In various embodiments, the human has an age of more than 30 years old.

### Immune Modulation

[0788] In various embodiments, the present compositions are capable of, or find use in methods of, immune modulation. For instance, in various embodiments, the present methods of treatment may involve the immune modulation described herein. In some embodiments, the immune modulation involves IFN signaling, including modified IFN signaling, in the context of a dendritic cell (DC).

[0789] In various embodiments, a multi-specific Fc-based chimeric protein complex is provided. In some embodiments, such multi-specific Fc-based chimeric protein complex of the invention recognizes and binds to a first target and one or more antigens found on one or more immune cells, which can include, without limitation, megakaryocytes, thrombocytes, erythrocytes, mast cells, basophils, neutrophils, eosinophils, monocytes, macrophages, natural killer cells, T lymphocytes (e.g., cytotoxic T lymphocytes, T helper cells, natural killer T cells), B lymphocytes, plasma cells, dendritic cells, or subsets thereof. In some embodiments, the Fc-based chimeric protein complex specifically binds to an antigen of interest and effectively directly or indirectly recruits one of more immune cells.

[0790] In some embodiments, the Fc-based chimeric protein complex specifically binds to an antigen of interest and effectively directly or indirectly recruits one of more immune cells to cause an immunosuppressive effect, e.g. the Fc-based chimeric protein complex directly or indirectly recruits an immunosuppressive immune cell. In some embodiments, the immunosuppressive immune cell is a regulatory T cell (or “Tregs” which, as used herein, refers to a subpopulation of T cells which modulate the immune system, abrogate autoimmune disease, maintain tolerance to self-antigens and thwart anti-tumor immune responses). Other immunosuppressive immune cells include myeloid suppressor cells (or “MSC,” which, as used herein, refers to a heterogeneous population of cells, defined by their myeloid origin, immature state, and ability to potently suppress T cell responses); tumor associated neutrophils (or “TANs” which, as used herein, refers to a subset of neutrophils that are capable of suppressing immune responses); tumor associated macrophages (or “TAMs” which, as used herein, refers to a subset of macrophages that may reduce an immune response), M2 macrophages, and/or tumor-inducing mast cells (which as used herein, refers to a subset of bone marrow-derived, long-lived, heterogeneous cellular population). Also, immunosuppressive immune cells include Th2 cells and Th17 cells. Additionally, immunosuppressive immune cells include immune cells, e.g., CD4+ and/or CD8+ T cells, expressing one or more checkpoint inhibitory receptors (e.g. receptors, including CTLA-4, B7-H3, B7-H4, TIM-3, expressed on immune cells that prevent or inhibit uncontrolled immune responses). See Stagg, J. et. al., Immunotherapeutic approach in triple-negative breast cancer. Ther Adv Med Oncol. (2013) 5(3):169-181).

[0791] In some embodiments, the Fc-based chimeric protein complex stimulates regulatory T cell (Treg) proliferation. Treg cells are characterized by the expression of the Foxp3 (Forkhead box p3) transcription factor. Most Treg cells are CD4+ and CD25+, and can be regarded as a subset of helper T cells, although a small population may be CD8+. Thus the immune response, which is to be modulated by a method of the invention, may comprise inducing proliferation of Treg cells, optionally in response to an antigen. Thus the method may comprise administering to the subject an Fc-based chimeric protein complex comprising the antigen. The antigen may be administered with an adjuvant which promotes proliferation of Treg cells.

[0792] Insofar as this method involves stimulating proliferation and differentiation of Treg cells in response to a specific antigen, it can be considered to be a method of stimulating an immune response. However, given that Treg cells may be capable of modulating the response of other cells of the immune system against an antigen in other ways, e.g. inhibiting or suppressing their activity, the effect on the immune system as a whole may be to modulate (e.g. suppress or inhibit) the response against that antigen. Thus the methods of this aspect of the invention can equally be referred to as methods of modulating (e.g. inhibiting or suppressing) an immune response against an antigen.

[0793] In some embodiments, the methods therapeutically or prophylactically inhibit or suppress an undesirable immune response against a particular antigen, even in a subject with pre-existing immunity or an on-going immune response to that antigen. This may be particularly useful, for example, in the treatment of autoimmune disease.

[0794] Under certain conditions, it may also be possible to tolerize a subject against a particular antigen by targeting the antigen to an antigen presenting cell expressing a target of the targeting moiety of the Fc-based chimeric protein complex. The invention thus provides a method for inducing tolerance in a subject towards an antigen, comprising administering to the subject a composition comprising the antigen, wherein the antigen is associated with a binding agent having affinity for the targeting moiety of the Fc-based chimeric protein complex and wherein the antigen is administered in the absence of an adjuvant. Tolerance in this context typically involves depletion of immune cells which would otherwise be capable of responding to that antigen, or inducing a lasting reduction in responsiveness to an antigen in such immune cells.

[0795] It may be particularly desirable to raise a Treg response against an antigen to which the subject exhibits, or is at risk of developing, an undesirable immune response. For example, it may be a self-antigen against which an immune response occurs in an autoimmune disease. Examples of autoimmune diseases in which specific antigens have been identified as potentially pathogenically significant include multiple sclerosis (myelin basic protein), insulin-dependent diabetes mellitus (glutamic acid decarboxylase), insulin-resistant diabetes mellitus (insulin receptor), celiac disease (gliadin), bullous pemphigoid (collagen type XVII), auto-immune haemolytic anaemia (Rh protein), auto-immune thrombocytopenia (GpIIb/IIIa), myaesthenia gravis (acetylcholine receptor), Graves' disease (thyroid-stimulating hormone receptor), glomerulonephritis, such as Goodpasture's disease (alpha3(IV)NC1 collagen), and pernicious anaemia (intrinsic factor). Alternatively, the target antigen may be an exogenous antigen which stimulates a response which also causes damage to host tissues. For example, acute rheumatic fever is caused by an antibody response to a Streptococcal antigen which cross-reacts with a cardiac muscle cell antigen. Thus these antigens, or particular fragments or epitopes thereof, may be suitable antigens for use in the present invention.

[0796] In various embodiments, the present agents, or methods using these agents, reduce or suppress autoreactive T cells. In some embodiments, the multi-specific Fc-based chimeric protein complex, optionally through an interferon signaling in the context of an Fc-based chimeric protein complex, causes this immunosuppression. In some embodiments, the multi-specific Fc-based chimeric protein complex stimulates PD-L1 or PD-L2 signaling and/or expression which may suppress autoreactive T cells. In some embodiments, the Fc-based chimeric protein complex, optionally through an interferon signaling in the context of an Fc-based chimeric protein complex, causes this immunosuppression. In some embodiments, the Fc-based chimeric protein complex stimulates PD-L1 or PD-L2 signaling and/or expression, which may suppress autoreactive T cells.

[0797] In various embodiments, the present methods comprise modulating the ratio of regulatory T cells to effector T cells in favor of immunosuppression, for instance, to treat autoimmune diseases. For instance, the present methods, in some embodiments, reduce and/or suppress one or more of cytotoxic T cells; effector memory T cells; central memory T cells; CD8⁺ stem cell memory effector cells; TH1 effector T-cells; TH2 effector T cells; TH9 effector T cells; TH17 effector T cells. For instance, the present methods, in some embodiments, increase and/or stimulate one or more of CD4⁺CD25⁺FOXP3⁺ regulatory T cells, CD4⁺CD25⁺ regulatory T cells, CD4⁺CD25⁻ regulatory T cells, CD4⁺CD25high regulatory T cells, TIM-3⁺PD-1⁺ regulatory T cells, lymphocyte activation gene-3 (LAG-3)⁺ regulatory T cells, CTLA-4/CD152⁺ regulatory T cells, neuropilin-1 (Nrp-1)⁺ regulatory T cells, CCR4⁺CCR8⁺ regulatory T cells, CD62L (L-selectin)⁺ regulatory T cells, CD45RBlow regulatory T cells, CD127low regulatory T cells, LRRC32/GARP⁺ regulatory T cells, CD39⁺ regulatory T cells, GITR⁺ regulatory T cells, LAP⁺ regulatory T cells, 1Bi11⁺ regulatory T cells, BTLA⁺ regulatory T cells, type 1 regulatory T cells (Tr1 cells), T helper type 3 (Th3) cells, regulatory cell of natural killer T cell phenotype (NKTregs), CD8⁺ regulatory T cells, CD8⁺CD28⁻ regulatory T cells and/or regulatory T-cells secreting IL-10, IL-35, TGF-β, TNF-α, Galectin-1, IFN-γ and/or MCP1.

[0798] In some embodiments, the present methods favor immune inhibitory signals over immune stimulatory signals. In some embodiments, the present methods allow for reversing or suppressing immune activating or co-stimulatory signals. In some embodiments, the present methods allow for providing immune inhibitory signals. For instance, in some embodiments, the present agents and methods reduce the effects of an immune stimulatory signal, which, without limitation, is one or more of 4-1BB, OX-40, HVEM, GITR, CD27, CD28, CD30, CD40, ICOS ligand; OX-40 ligand, LIGHT (CD258), GITR ligand, CD70, B7-1, B7-2, CD30 ligand, CD40 ligand, ICOS, ICOS ligand, CD137 ligand and TL1A. Further, in some embodiments, the present agents and methods increase the effects of an immune inhibitory signal, which, without limitation, is one or more of CTLA-4, PD-L1, PD-L2, PD-1, BTLA, HVEM, TIM3, GAL9, LAG3, VISTA, KIR, 2B4, CD160 (also referred to as BY55), CGEN-15049, CHK 1 and CHK2 kinases, A2aR, CEACAM (e.g., CEACAM-1, CEACAM-3 and/or CEACAM-5), and various B-7 family ligands (including, but are not limited to, B7-1, B7-2, B7-DC, B7-H1, B7-H2, B7-H3, B7-H4, B7-H5, B7-H6 and B7-H7.

### Kits

[0799] The present invention also provides kits for the administration of any Fc-based chimeric protein complex described herein (e.g. with or without additional therapeutic agents). The kit is an assemblage of materials or components, including at least one of the inventive pharmaceutical compositions described herein. Thus, in some embodiments, the kit contains at least one of the pharmaceutical compositions described herein.

[0800] The exact nature of the components configured in the kit depends on its intended purpose. In one embodiment, the kit is configured for the purpose of treating human subjects.

[0801] Instructions for use may be included in the kit. Instructions for use typically include a tangible expression describing the technique to be employed in using the components of the kit to effect a desired therapeutic outcome, such as to treat cancer. Optionally, the kit also contains other useful components, such as, diluents, buffers, pharmaceutically acceptable carriers, syringes, catheters, applicators, pipetting or measuring tools, bandaging materials or other useful paraphernalia as will be readily recognized by those of skill in the art.

[0802] The materials and components assembled in the kit can be provided to the practitioner stored in any convenience and suitable ways that preserve their operability and utility. For example, the components can be provided at room, refrigerated or frozen temperatures. The components are typically contained in suitable packaging materials. In various embodiments, the packaging material is constructed by well-known methods, preferably to provide a sterile, contaminant-free environment. The packaging material may have an external label which indicates the contents and/or purpose of the kit and/or its components.

### Definitions

[0803] As used herein, “a,” “an,” or “the” can mean one or more than one.

[0804] Further, the term “about” when used in connection with a referenced numeric indication means the referenced numeric indication plus or minus up to 10% of that referenced numeric indication. For example, the language “about 50” covers the range of 45 to 55.

[0805] As used herein, the term “effective amount” refers to a quantity sufficient to achieve a desired therapeutic and/or prophylactic effect, e.g., an amount which results in the prevention of, or a decrease in a disease or disorder or one or more signs or symptoms associated with a disease or disorder. In the context of therapeutic or prophylactic applications, the amount of a composition administered to the subject will depend on the degree, type, and severity of the disease and on the characteristics of the individual, such as general health, age, sex, body weight and tolerance to drugs. The skilled artisan will be able to determine appropriate dosages depending on these and other factors. The compositions can also be administered in combination with one or more additional therapeutic compounds. In the methods described herein, the therapeutic compounds may be administered to a subject having one or more signs or symptoms of a disease or disorder. As used herein, something is “decreased” if a read-out of activity and/or effect is reduced by a significant amount, such as by at least about 10%, at least about 20%, at least about 30%, at least about 40%, at least about 50%, at least about 60%, at least about 70%, at least about 80%, at least about 90%, at least about 95%, at least about 97%, at least about 98%, or more, up to and including at least about 100%, in the presence of an agent or stimulus relative to the absence of such modulation. As will be understood by one of ordinary skill in the art, in some embodiments, activity is decreased and some downstream read-outs will decrease but others can increase.

[0806] Conversely, activity is “increased” if a read-out of activity and/or effect is increased by a significant amount, for example by at least about 10%, at least about 20%, at least about 30%, at least about 40%, at least about 50%, at least about 60%, at least about 70%, at least about 80%, at least about 90%, at least about 95%, at least about 97%, at least about 98%, or more, up to and including at least about 100% or more, at least about 2-fold, at least about 3-fold, at least about 4-fold, at least about 5-fold, at least about 6-fold, at least about 7-fold, at least about 8-fold, at least about 9-fold, at least about 10-fold, at least about 50-fold, at least about 100-fold, in the presence of an agent or stimulus, relative to the absence of such agent or stimulus.

[0807] As referred to herein, all compositional percentages are by weight of the total composition, unless otherwise specified. As used herein, the word “include,” and its variants, is intended to be non-limiting, such that recitation of items in a list is not to the exclusion of other like items that may also be useful in the compositions and methods of this technology. Similarly, the terms “can” and “may” and their variants are intended to be non-limiting, such that recitation that an embodiment can or may comprise certain elements or features does not exclude other embodiments of the present technology that do not contain those elements or features.

[0808] Although the open-ended term “comprising,” as a synonym of terms such as including, containing, or having, is used herein to describe and claim the invention, the present invention, or embodiments thereof, may alternatively be described using alternative terms such as “consisting of” or “consisting essentially of.”

[0809] As used herein, the words “preferred” and “preferably” refer to embodiments of the technology that afford certain benefits, under certain circumstances. However, other embodiments may also be preferred, under the same or other circumstances. Furthermore, the recitation of one or more preferred embodiments does not imply that other embodiments are not useful, and is not intended to exclude other embodiments from the scope of the technology.

[0810] The amount of compositions described herein needed for achieving a therapeutic effect may be determined empirically in accordance with conventional procedures for the particular purpose. Generally, for administering therapeutic agents for therapeutic purposes, the therapeutic agents are given at a pharmacologically effective dose. A “pharmacologically effective amount,” “pharmacologically effective dose,” “therapeutically effective amount,” or “effective amount” refers to an amount sufficient to produce the desired physiological effect or amount capable of achieving the desired result, particularly for treating the disorder or disease. An effective amount as used herein would include an amount sufficient to, for example, delay the development of a symptom of the disorder or disease, alter the course of a symptom of the disorder or disease (e.g., slow the progression of a symptom of the disease), reduce or eliminate one or more symptoms or manifestations of the disorder or disease, and reverse a symptom of a disorder or disease. Therapeutic benefit also includes halting or slowing the progression of the underlying disease or disorder, regardless of whether improvement is realized.

[0811] Effective amounts, toxicity, and therapeutic efficacy can be determined by standard pharmaceutical procedures in cell cultures or experimental animals, e.g., for determining the LD50 (the dose lethal to about 50% of the population) and the ED50 (the dose therapeutically effective in about 50% of the population). The dosage can vary depending upon the dosage form employed and the route of administration utilized. The dose ratio between toxic and therapeutic effects is the therapeutic index and can be expressed as the ratio LD50/ED50. In some embodiments, compositions and methods that exhibit large therapeutic indices are preferred. A therapeutically effective dose can be estimated initially from in vitro assays, including, for example, cell culture assays. Also, a dose can be formulated in animal models to achieve a circulating plasma concentration range that includes the IC50 as determined in cell culture, or in an appropriate animal model. Levels of the described compositions in plasma can be measured, for example, by high performance liquid chromatography. The effects of any particular dosage can be monitored by a suitable bioassay. The dosage can be determined by a physician and adjusted, as necessary, to suit observed effects of the treatment.

[0812] In certain embodiments, the effect will result in a quantifiable change of at least about 10%, at least about 20%, at least about 30%, at least about 50%, at least about 70%, or at least about 90%. In some embodiments, the effect will result in a quantifiable change of about 10%, about 20%, about 30%, about 50%, about 70%, or even about 90% or more. Therapeutic benefit also includes halting or slowing the progression of the underlying disease or disorder, regardless of whether improvement is realized.

[0813] As used herein, “methods of treatment” are equally applicable to use of a composition for treating the diseases or disorders described herein and/or compositions for use and/or uses in the manufacture of a medicaments for treating the diseases or disorders described herein.

### EXAMPLES

[0814] In some Examples, two variants of the knob-in-hole technology are used: Ridgway (derived from Ridgway et al., Protein Engineering 1996; 9:617-621) and Merchant (derived from Merchant et al., Nature Biotechnology 1998; 16:677-681 and used in examples 1 and 2 described herein). Sequences are referred to as Fc1 and Fc2 (Ridgway hole and knob, respectively) and Fc3 and Fc4 (Merchant hole and knob, respectively) and shown below.
[0815] Fc1: Ridgway hole: hIgG1 Fc_L234A_L235A_P329G_Y407T having the following amino acid sequence:

(SEQ ID NO: 1565)
DKTHTCPPCPAPEAAGGPSVFLFPPKPKDTLMISRTPEVTCVVVDVSHED
PEVKFNWYVDGVEVHNAKTKPREEQYNSTYRVVSVLTVLHQDWLNGKEYK
CKVSNKALPAPIEKTISKAKGQPREPQVYTLPPSRDELTKNQVSLTCLVK
GFYPSDIAVEWESNGQPENNYKTTPPVLDSDGSFFLTSKLTVDKSRWQQG
NVFSCSVMHEALHNHYTQKSLSLSPGK

[0816] Fc2: Ridgway knob: hIgG1 Fc_L234A_L235A_P329G_T366Y having the following amino acid sequence:

(SEQ ID NO: 1566)
DKTHTCPPCPAPEAAGGPSVFLFPPKPKDTLMISRTPEVTCWVDVSHEDP
EVKFNWYVDGVEVHNAKTKPREEQYNSTYRVVSVLTVLHQDWLNGKEYKC
KVSNKALPAPIEKTISKAKGQPREPQVYTLPPSRDELTKNQVSLYCLVKG
FYPSDIAVEWESNGQPENNYKTTPPVLDSDGSFFLYSKLTVDKSRWQQGN
VFSCSVMHEALHNHYTQKSLSLSPGK

[0817] Fc3: Merchant hole: hIgG1 Fc_L234A_L235A_K322Q_Y349C_T366S_L368A_Y407V having the following amino acid sequence:

(SEQ ID NO: 1567)
DKTHTCPPCPAPEAAGGPSVFLFPPKPKDTLMISRTPEVTCVVVDVSHED
PEVKFNWYVDGVEVHNAKTKPREEQYNSTYRVVSVLTVLHQDWLNGKEYK
CKVSNKALPAPIEKTISKAKGQPREPQVCTLPPSRDELTKNQVSLSCAVK
GFYPSDIAVEWESNGQPENNYKTTPPVLDSDGSFFLVSKLTVDKSRWQQG
NVFSCSVMHEALHNHYTQKSLSLSPGK

[0818] Fc4: Merchant knob: hIgG1 Fc_L234A_L235A_K322Q_S354C_T366W having the following amino acid sequence:

(SEQ ID NO: 1568)
DKTHTCPPCPAPEAAGGPSVFLFPPKPKDTLMISRTPEVTCVVVDVSHED
PEVKFNWYVDGVEVHNAKTKPREEQYNSTYRVVSVLTVLHQDWLNGKEYK
CKVSNKALPAPIEKTISKAKGQPREPQVYTLPPCRDELTKNQVSLWCLVK
GFYPSDIAVEWESNGQPENNYKTTPPVLDSDGSFFLYSKLTVDKSRWQQG
NVFSCSVMHEALHNHYTQKSLSLSPGK

### Example 1: AcTakine's Based on Dimeric Signaling Agents

[0819] As an alternative to expressing Activity-on-Target cytokines (AcTakines) as a single chain cytokine in which two copies of the cytokines (signaling agents) for dimeric cytokines are present on the same Fc-chain by directly linking to each other or linking to each other with a linker (see FIG. 2), split dimeric AcTakines were generated by expressing both monomers of the cytokines (signaling agents) on each of the Fc-chains (see FIGS. 3A-J and 4A-J). In Example 1, AcTakines were generated and evaluated based on interferon gamma (IFNg) mutant lacking the last 16 C-terminal amino acids (IFNg_delta 16), and targeted via a human Clec9A specific VHH (clone R1CHCL50). Since IFNg is biologically active as a dimer, the sequence encoding IFNg_delta 16 was cloned at C-terminal of both Fc arms resulting in an Actaferon (AFN) with a split cytokine structure (see FIG. 4A). The relevant sequences were:

P-1857: R1CHCL50-20*GGS-Fc3-IFNg_delta 16
(SEQ ID NO: 1576)
QLQESGGGLVHPGGSLRLSCAASGSFSSINVMGWYRQAPGKERELVARIT
NLGLPNYADSVTGRFTISRDNAKNTVYLQMNSLKPEDTAVYYCYLVALKA
EYWGQGTQVTVSSGGSGGSGGSGGSGGSGGSGGSGGSGGSGGSGGSGGSG
GSGGSGGSGGSGGSGGSGGSGGSDKTHTCPPCPAPEAAGGPSVFLFPPKP
KDTLMISRTPEVTCVVVDVSHEDPEVKFNWYVDGVEVHNAKTKPREEQYN
STYRVVSVLTVLHQDWLNGKEYKCQVSNKALPAPIEKTISKAKGQPREPQ
VCTLPPSRDELTKNQVSLSCAVKGFYPSDIAVEWESNGQPENNYKTTPPV
LDSDGSFFLVSKLTVDKSRWQQGNVFSCSVMHEALHNHYTQKSLSLSPGK
GGSGGSGGSGGSGGSGGSGGSGGSGGSGGSGGSGGSGGSGGSGGSGGSGG
SGGSGGSGGSQDPYVKEAENLKKYFNAGHSDVADNGTLFLGILKNWKEES
DRKIMQSQIVSFYFKLFKNFKDDQSIQKSVETIKEDMNVKFFNSNKKKRD
DFEKLTNYSVTDLNVQRKAIHELIQVMAELSPAAKTG
P-1856: Fc4-20*GGS-IFNg_delta 16
(SEQ ID NO: 1577)
DKTHTCPPCPAPEAAGGPSVFLFPPKPKDTLMISRTPEVTCVVVDVSHED
PEVKFNWYVDGVEVHNAKTKPREEQYNSTYRVVSVLTVLHQDWLNGKEYK
CQVSNKALPAPIEKTISKAKGQPREPQVYTLPPCRDELTKNQVSLWCLVK
GFYPSDIAVEWESNGQPENNYKTTPPVLDSDGSFFLYSKLTVDKSRWQQG
NVFSCSVMHEALHNHYTQKSLSLSPGKGGSGGSGGSGGSGGSGGSGGSGG
SGGSGGSGGSGGSGGSGGSGGSGGSGGSGGSGGSGGSQDPYVKEAENLKK
YFNAGHSDVADNGTLFLGILKNWKEESDRKIMQSQIVSFYFKLFKNFKDD
QSIQKSVETIKEDMNVKFFNSNKKKRDDFEKLTNYSVTDLNVQRKAIHEL
IQVMAELSPAAKTG

### Production and Purification of IFNg Fc AFN

[0820] The constructs R1CHCL50-20*GGS-Fc3-IFNg_delta 16 (P-1857) and Fc4-20*GGS-IFNg_delta 16 (P-1856) were combined, and transiently expressed in the ExpiCHO™ expression system (Thermo Fisher Scientific) according to the manufacturer's guidelines. One week after the transfection, supernatant was collected, and cells were removed by centrifugation. Recombinant proteins, IFNg Fc AFN, were purified from the supernatant using Pierce Protein A spin plates (Thermo Fisher Scientific).

### Biological Activity on Transient Transfected Hek293T Cells

[0821] Hek293T cells were transiently transfected with: (i) interferon gamma receptor (IFNGR1); (ii) signal transducer and activator of signaling 1 (STAT1); (iii) pGAS-TA-luciferase receptor; and (iv) empty vector (MOCK) or human Clec9A. Two days after the transfection, the cells were stimulated overnight with a serial dilution wild type IFNg or IFNg Fc AFN. Luciferase activities of Hek293T cells were measured in cell lysates. FIGS. 8A and 8B show the result of the luciferase activities and illustrate that the MOCK or Clec9A transfected cells were comparably sensitive to wild type interferon gamma, while IFNg Fc AFN was only able to signal in cells expressing the target Clec9A.

### Example 2: AcTakines Based on Trimeric Signaling Agents

[0822] As an alternative to expressing trimeric cytokines as a single chain variant in which three copies of the cytokine (signaling agents) are present on the same Fc-chain by directly linking to each other or linking to each other with a linker (see FIG. 5), split trimeric AcTakines were generated by expressing a monomer of the cytokine (signaling agents) on the first Fc-chain and the dimer of the cytokine on the second Fc-chain of the Fc-based AcTakine (see FIGS. 6A-F and 7A-F). In Example 2, AcTakines were generated and evaluated based on a tumor necrosis factor with the Y87F mutation (TNF_Y87F), and targeted via a human CD20 specific VHH (clone 2HCD25 (SEQ ID NO: 1406)). TNF_Y87F was cloned as a single chain trimer with GGGGS-linkers on one Fc arm, and the resulting AcTakine was referred to as the AcTafactor (AFR). As an alternative, one TNF_Y87F monomer was cloned after the first Fc arm, and two TNF_Y87F monomers (with GGGGS-linker) were cloned on the second arm. The resulting construct was referred to as ‘split AFR’ with a structure as depicted in FIG. 7A.

P-1570: CD20 VHH-20*GGS-Fc3
(SEQ ID NO: 1578)
QVQLQESGGGLAQAGGSLRLSCAASGRTFSMGWFRQAPGKEREFVAAITY
SGGSPYYASSVRGRFTISRDNAKNTVYLQMNSLKPEDTAVYYCAANPTYG
SDWNAENWGQGTQVTVSSGGSGGSGGSGGSGGSGGSGGSGGSGGSGGSGG
SGGSGGSGGSGGSGGSGGSGGSGGSGGSDKTHTCPPCPAPEAAGGPSVFL
FPPKPKDTLMISRTPEVTCVVVDVSHEDPEVKFNWYVDGVEVHNAKTKPR
EEQYNSTYRVVSVLTVLHQDWLNGKEYKCQVSNKALPAPIEKTISKAKGQ
PREPQVCTLPPSRDELTKNQVSLSCAVKGFYPSDIAVEWESNGQPENNYK
TTPPVLDSDGSFFLVSKLTVDKSRWQQGNVFSCSVMHEALHNHYTQKSLS
LSPGK
P-1545: Fc4-20*GGS-3*TNF_Y87F
(SEQ ID NO: 1579)
DKTHTCPPCPAPEAAGGPSVFLFPPKPKDTLMISRTPEVTCVVVDVSHED
PEVKFNWYVDGVEVHNAKTKPREEQYNSTYRVVSVLTVLHQDWLNGKEYK
CQVSNKALPAPIEKTISKAKGQPREPQVYTLPPCRDELTKNQVSLWCLVK
GFYPSDIAVEWESNGQPENNYKTTPPVLDSDGSFFLYSKLTVDKSRWQQG
NVFSCSVMHEALHNHYTQKSLSLSPGKGGSGGSGGSGGSGGSGGSGGSGG
SGGSGGSGGSGGSGGSGGSGGSGGSGGSGGSGGSGGSSSRTPSDKPVAHV
VANPQAEGQLQWLNRRANALLANGVELRDNQLVVPSEGLYLIYSQVLFKG
QGCPSTHVLLTHTISRIAVSFQTKVNLLSAIKSPCQRETPEGAEAKPWYE
PIYLGGVFQLEKGDRLSAEINRPDYLDFAESGQVYFGIIALGGGGSSSRT
PSDKPVAHVVANPQAEGQLQWLNRRANALLANGVELRDNQLVVPSEGLYL
IYSQVLFKGQGCPSTHVLLTHTISRIAVSFQTKVNLLSAIKSPCQRETPE
GAEAKPWYEPIYLGGVFQLEKGDRLSAEINRPDYLDFAESGQVYFGIIAL
GGGGSSSRTPSDKPVAHWVANPQAEGQLQWLNRRANALLANGVELRDNQL
VVPSEGLYLIYSQVLFKGQGCPSTHVLLTHTISRIAVSFQTKVNLLSAIK
SPCQRETPEGAEAKPWYEPIYLGGVFQLEKGDRLSAEINRPDYLDFAESG
QVYFGIIAL
P-1757: CD20 VHH-Fc3-TNF_Y87F
(SEQ ID NO: 1580)
QVQLQESGGGLAQAGGSLRLSCAASGRTFSMGWFRQAPGKEREFVAAITY
SGGSPYYASSVRGRFTISRDNAKNTVYLQMNSLKPEDTAVYYCAANPTYG
SDWNAENWGQGTQVTVSSGGSGGSGGSGGSGGSGGSGGSGGSGGSGGSGG
SGGSGGSGGSGGSGGSGGSGGSGGSGGSDKTHTCPPCPAPEAAGGPSVFL
FPPKPKDTLMISRTPEVTCVVVDVSHEDPEVKFNWYVDGVEVHNAKTKPR
EEQYNSTYRVVSVLTVLHQDWLNGKEYKCQVSNKALPAPIEKTISKAKGQ
PREPQVCTLPPSRDELTKNQVSLSCAVKGFYPSDIAVEWESNGQPENNYK
TTPPVLDSDGSFFLVSKLTVDKSRWQQGNVFSCSVMHEALHNHYTQKSLS
LSPGKGGSGGSGGSGGSGGSGGSGGSGGSGGSGGSGGSGGSGGSGGSGGS
GGSGGSGGSGGSGGSSSRTPSDKPVAHVVANPQAEGQLQWLNRRANALLA
NGVELRDNQLVVPSEGLYLIYSQVLFKGQGCPSTHVLLTHTISRIAVSFQ
TKVNLLSAIKSPCQRETPEGAEAKPWYEPIYLGGVFQLEKGDRLSAEINR
PDYLDFAESGQVYFGIIAL
P-1629: Fc4-20*GGS-2*TNF_Y87F
(SEQ ID NO: 1581)
DKTHTCPPCPAPEAAGGPSVFLFPPKPKDTLMISRTPEVTCVVVDVSHED
PEVKFNWYVDGVEVHNAKTKPREEQYNSTYRVVSVLTVLHQDWLNGKEYK
CQVSNKALPAPIEKTISKAKGQPREPQVYTLPPCRDELTKNQVSLWCLVK
GFYPSDIAVEWESNGQPENNYKTTPPVLDSDGSFFLYSKLTVDKSRWQQG
NVFSCSVMHEALHNHYTQKSLSLSPGKGGSGGSGGSGGSGGSGGSGGSGG
SGGSGGSGGSGGSGGSGGSGGSGGSGGSGGSGGSGGSSSRTPSDKPVAHV
VANPQAEGQLQWLNRRANALLANGVELRDNQLVVPSEGLYLIYSQVLFKG
QGCPSTHVLLTHTISRIAVSFQTKVNLLSAIKSPCQRETPEGAEAKPWYE
PIYLGGVFQLEKGDRLSAEINRPDYLDFAESGQVYFGIIALGGGGSSSRT
PSDKPVAHWVANPQAEGQLQWLNRRANALLANGVELRDNQLVVPSEGLYL
IYSQVLFKGQGCPSTHVLLTHTISRIAVSFQTKVNLLSAIKSPCQRETPE
GAEAKPWYEPIYLGGVFQLEKGDRLSAEINRPDYLDFAESGQVYFGIIAL

### Production and Purification of Human CD20 VHH-Based AFRs

[0823] The constructs were combined, and transiently expressed in the ExpiCHO™ expression system (Thermo Fisher Scientific) as follows:
[0824] (i) CD20 VHH-20⁺GGS-Fc3 (P-1570) and Fc4-20⁺GGS-3⁺TNF_Y87F (P-1545) (AFR; see FIG. 5); and
[0825] (ii) CD20 VHH-Fc3-TNF_Y87F (P-1757) and Fc4-2⁺TNF_Y87F (P-1629) (splitAFR; see FIG. 7A).

[0826] One week after the transfection, supernatant was collected and cells were removed by centrifugation. Recombinant proteins were purified from the supernatant using the Pierce Protein A spin plates (Thermo Fisher Scientific).

### Biological Activity on HEK-Dual Reporter Cell-Lines

[0827] HEK-Dual™ TNF-α cells (InvivoGen) were derived from the human embryonic kidney 293 cell line by stable co-transfection of two NF-κB-inducible reporter constructs. This allowed the TNF-α-induced NF-κB activation by monitoring the activity of either a secreted alkaline phosphatase (SEAP) or a secreted luciferase (Lucia). Parental cells were stably transfected with an expression vector encoding the human CD20 sequence. Stable transfected clones were selected in puromycin-containing medium. Parental HEK-Dual™ and HEK-Dual™-hCD20 cells were seeded at 20,000 cells per 96-well and subsequently stimulated overnight with a serial dilution of Fc AFRs. Secreted Lucia luciferase activity was measured using QUANTI-Luc™ (InvivoGen). FIGS. 9A to 9C show the results of luciferase activities and illustrate that both cell-lines were comparably sensitive to wild type TNF, while the CD20 Fc AFRs were more active on targeted cells (HEK-Dual™-hCD20) compared to untargeted cells (HEK-Dual™).

### EQUIVALENTS

[0828] While the invention has been described in connection with specific embodiments thereof, it will be understood that it is capable of further modifications and this application is intended to cover any variations, uses, or adaptations of the invention following, in general, the principles of the invention and including such departures from the present disclosure as come within known or customary practice within the art to which the invention pertains and as may be applied to the essential features hereinbefore set forth and as follows in the scope of the appended claims.

[0829] Those skilled in the art will recognize, or be able to ascertain, using no more than routine experimentation, numerous equivalents to the specific embodiments described specifically herein. Such equivalents are intended to be encompassed in the scope of the following claims.

### INCORPORATION BY REFERENCE

[0830] All patents and publications referenced herein are hereby incorporated by reference in their entireties.

[0831] The publications discussed herein are provided solely for their disclosure prior to the filing date of the present application. Nothing herein is to be construed as an admission that the present invention is not entitled to antedate such publication by virtue of prior invention.

[0832] As used herein, all headings are simply for organization and are not intended to limit the disclosure in any manner. The content of any individual section may be equally applicable to all sections.

What is claimed is:

1. An Fc-based chimeric protein complex comprising:
(a) a signaling agent which is functional as a multimer of monomers, wherein the signaling agent is (i) a wild-type human IFNγ or human TNFα or (ii) a modified human IFNγ or human TNFα that has one or more mutations that confer improved safety relative to the wild type human IFNγ or human TNFα;
(b) an Fc domain comprising two Fc chains, the two Fc chains each comprising one or more signaling agent monomers such that the functional multimer of monomers is reconstituted upon association of the two Fc chains, wherein the Fc domain optionally has one or more mutations that reduce or eliminate one or more effector functions of the Fc domain, promotes Fc chain pairing of the Fc domain, and/or stabilizes a hinge region in the Fc domain; and
(c) a targeting moiety comprising a recognition domain that recognizes and/or binds to a target.

2. The Fc-based chimeric protein complex of claim 1, further comprising one or more linkers.

3. The Fc-based chimeric protein complex of claim 2, wherein at least one linker connects at least one signaling agent monomer to the Fc chain.

4. The Fc-based chimeric protein complex of claim 2, wherein at least one linker connects one signaling agent monomer to another signaling agent monomer.

5. The Fc-based chimeric protein complex of claim 2, wherein at least one linker connects at least one signaling agent monomer to the targeting moiety.

6. The Fc-based chimeric protein complex of claim 2, wherein a first linker connects at least one signaling agent monomer to a first Fc chain and a second linker connects at least one signaling agent monomer to a second Fc chain.

7. The Fc-based chimeric protein complex of claim 2, wherein at least one linker connects the targeting moiety to the Fc chain.

8. The Fc-based chimeric protein complex of claim 1, wherein Fc-based chimeric protein complex has the configuration and/or orientation as shown in any one of FIGS. 3A-J, 4A-J, 5, 6A-F, and 7A-F.

9. The Fc-based chimeric protein complex of claim 1, wherein the human IFNγ or human TNFα signaling agent is a dimeric human IFNγ or human TNFα signaling agent and each monomer is linked to different Fc-chains.

10. The Fc-based chimeric protein complex of claim 1, wherein the human IFNγ or human TNFα signaling agent is a trimeric human IFNγ or human TNFα signaling agent and two monomers are linked to a first Fc-chain and one monomer is linked to a second Fc-chain.

11. The Fc-based chimeric protein complex of claim 1 or 2, wherein the Fc domain is selected from IgG, IgA, IgD, IgM, or IgE.

12. The Fc-based chimeric protein complex of claim 11, wherein the IgG is selected from IgG1, IgG2, IgG3, or IgG4.

13. The Fc-based chimeric protein complex of claim 11, wherein the Fc domain is selected from human IgG, human IgA, human IgD, human IgM, or human IgE.

14. The Fc-based chimeric protein complex of claim 13, wherein the human IgG is selected from human IgG1, human IgG2, human IgG3, or human IgG4.

15. The Fc-based chimeric protein complex of any one of claims 1 to 14, wherein the human IFNγ or human TNFα signaling agent is wild type.

16. The Fc-based chimeric protein of claim 15, wherein the signaling agent is wild type human IFNγ.

17. The Fc-based chimeric protein of claim 16, wherein the signaling agent is a wild type human IFNγ having the amino acid sequence of SEQ ID NO: 1563.

18. The Fc-based chimeric protein of any one of claims 1 to 14, wherein the human IFNγ or human TNFα signaling agent is a modified human IFNγ or human TNFα signaling agent.

19. The Fc-based chimeric protein complex of claim 18, wherein the mutations in the modified human IFNγ or human TNFα signaling agent allow for attenuation of activity of the signaling agent or attenuation of the affinity of the human IFNγ or human TNFα signaling agent for its receptor.

20. The Fc-based chimeric protein complex of claim 19, wherein agonistic or antagonistic activity is attenuated.

21. The Fc-based chimeric protein complex of claim 18, wherein the human IFNγ comprises one or more mutations selected from a truncation of about 16 amino acid residues at the C-terminus, a truncation about 15 amino acid residues at the C-terminus, a truncation of about 14 amino acid residues at the C-terminus, a truncation of about 7 amino acid residues at the C-terminus, a truncation of about 5 amino acid residues at the C-terminus, a truncation of about 5 to about 20 amino acids at the C-terminus, V5E, S20E, V22A, A23G, A23F, D24G, G26Q, H111A, H111D, I114A, Q115A, and A118G with respect to the amino acid sequence of SEQ ID NO: 1563.

22. The Fc-based chimeric protein complex of claim 18, wherein the modified human TNFα comprises one or more mutations selected from Y87F, R32G, N34G, Q67G, H73G, L75G, L75A, L75S, T77A, S86G, Y87Q, Y87L, Y87A, V91G, V91A, I97A, I97Q, 197S, T105G, P106G, A109Y, P113G, Y115G, Y115A, E127G, N137G, D143N, A145G, A145T, and Y87Q/I97A with respect to the amino acid sequence of SEQ ID NO: 14.

23. The Fc-based chimeric protein complex of any one of claims 18-22, wherein the modified human IFNγ or human TNFα signaling agent has reduced affinity or activity at the signaling agent's receptor relative to a wild type human IFNγ or human TNFα signaling agent.

24. The Fc-based chimeric protein complex of any one of claims 18-23, wherein at least one monomer of the human IFNγ or human TNFα signaling agent is modified.

25. The Fc-based chimeric protein complex of any one of claims 18-23, wherein all monomers of the human IFNγ or human TNFα signaling agent are modified.

26. The Fc-based chimeric protein complex of claim 25, wherein each monomer of the human IFNγ or human TNFα signaling agent is modified with the same mutation.

27. The Fc-based chimeric protein complex of claim 25, wherein each monomer of the human IFNγ or human TNFα signaling agent is modified with different mutations.

28. The Fc-based chimeric protein complex of any one of claims 18 to 27, wherein the targeting moiety restores the modified signaling agent's affinity and/or activity at the human IFNγ or human TNFα signaling agent's receptor.

29. The Fc-based chimeric protein complex of any one of claims 18 to 27, wherein the targeting moiety restores the affinity and/or activity of at least one monomer of the multimeric signaling agent at the human IFNγ or human TNFα signaling agent's receptor.

30. The Fc-based chimeric protein complex of any one of the claims 1 to 29, wherein the Fc comprises L234A, L235A, and one additional mutation selected from K322A, K322Q, D265A, P329G, and P331S substitutions in human IgG1, wherein the numbering is based on the EU convention.

31. The Fc-based chimeric protein complex of any one of claims 1 to 30, wherein the Fc comprises a S228P substitution in human IgG4, wherein the numbering is based on the EU convention.

32. The Fc-based chimeric protein complex of any one of claims 1 to 31, wherein the Fc chain pairing is promoted by ionic pairing and/or a knob-in-hole pairing.

33. The Fc-based chimeric protein complex of any one of claims 1 to 32, wherein the one or more mutations to the Fc domain results in an ionic pairing between the Fc chains in the Fc domain.

34. The Fc-based chimeric protein complex of any one of claims 1 to 33, wherein the one or more mutations to the Fc domain results in a knob-in-hole pairing of the Fc domain.

35. The Fc-based chimeric protein complex of any one of claims 1 to 34, wherein the one or more mutations to the Fc domain results in the reduction or elimination of the effector function of the Fc domain.

36. The Fc-based chimeric protein complex of any one of above claims, wherein the targeting moiety comprises a recognition domain that recognizes and/or binds an antigen or receptor on a tumor cell, and/or tumor stroma, and/or ECM, and/or immune cell.

37. The Fc-based chimeric protein complex of claim 36, wherein the immune cell is selected from a T cell, a B cell, a dendritic cell, a macrophage, a neutrophil, and a NK cell.

38. The Fc-based chimeric protein complex of any one of the above claims, wherein the targeting moiety comprises a single-domain antibody, a recombinant heavy-chain-only antibody (VHH), a single-chain antibody (scFv), a shark heavy-chain-only antibody (VNAR), a microprotein, a darpin, an anticalin, an adnectin, an aptamer, a Fv, a Fab, a Fab′, a F(ab′)₂, a peptide mimetic molecule, a natural ligand for a receptor, or a synthetic molecule.

39. The Fc-based chimeric protein complex of any one of the above claims, wherein the targeting moiety comprises a VHH.

40. The Fc-based chimeric protein complex of any one of the above claims, wherein the targeting moiety recognizes and/or binds to its target without substantially neutralizing the target's activity or wherein the targeting moiety recognizes and/or binds to its target and substantially neutralizes the target's activity.

41. The Fc-based chimeric protein complex of any one of the above claims, wherein the targeting moiety directly or indirectly recruits immune cells to tumor cells or to the tumor microenvironment.

42. The Fc-based chimeric protein complex of any one of the above claims, wherein the targeting moiety enhances antigen presentation.

43. The Fc-based chimeric protein complex of any one of the above claims, wherein the targeting moiety enhances tumor antigen presentation, optionally by dendritic cells.

44. The Fc-based chimeric protein complex of any one of the above claims, wherein the targeting moiety binds to one of the following targets: Clec9A, CD8, CD13, CD20, Clec4c, PD-1, PD-L1, PD-L2, SIRP1α, FAP, XCR1, tenascin CA1, or Flt3.

45. The Fc-based chimeric protein complex of any one of the above claims, wherein the targeting moiety is functional as a multimer of monomers and is, optionally, reconstituted upon association of the two Fc chains.

46. The Fc-based chimeric protein complex of claim 45, wherein the targeting moiety is Flt3 ligand.

47. The Fc-based chimeric protein complex of claim 45, wherein the targeting moiety is XCL1 or XCL2.

48. The Fc-based chimeric protein complex of any one of the above claims, wherein the human IFNγ or human TNFα signaling agent is homomeric or heteromeric.

49. The Fc-based chimeric protein complex of any one of the above claims, wherein the human IFNγ or human TNFα signaling agent is a homomeric dimer, a homomeric trimer, a heteromeric dimer, or a heteromeric trimer.

50. The Fc-based chimeric protein complex of any one of the above claims, wherein the Fc domain is homodimeric.

51. The Fc-based chimeric protein complex of any one of the above claims, wherein the Fc domain is heterodimeric.

52. The Fc-based chimeric protein complex of claim 18, wherein the signaling agent is a modified IFNγ, optionally having a deletion of the last 16 C-terminal amino acids with respect to the amino acid sequence of SEQ ID NO: 1563.

53. The Fc-based chimeric protein of claim 52, wherein the targeting moiety binds to Clec9A.

54. The Fc-based chimeric protein of claim 18, wherein the signaling agent is a modified TNFα, optionally having a Y87F mutation with respect to the amino acid sequence of SEQ ID NO: 14.

55. The Fc-based chimeric protein of claim 54, wherein the targeting moiety binds to CD20.

56. The Fc-based chimeric protein complex of any one of the above claims, wherein the chimeric protein complex further comprises a second targeting moiety.

57. The Fc-based chimeric protein complex of claim 56, wherein the second targeting moiety binds to one of the following targets: Clec9A, CD8, CD13, CD20, Clec4c, PD-1, PD-L1, PD-L2, SIRP1α, FAP, XCR1, tenascin CA1, or Flt3.

58. The Fc-based chimeric protein complex of any one of the above claims, wherein the chimeric protein complex further comprises a second signaling agent.

59. The Fc-based chimeric protein complex of claim 58, wherein the second signaling agent is a wild type or modified signaling agent, the modified signaling agent being optionally a mutated signaling agent.

60. The Fc-based chimeric protein complex of claim 59, wherein the second signaling agent is selected from human: IFNγ and TNFα.

61. The Fc-based chimeric protein complex of claim 58, wherein the second signaling agent is functional as a multimer of monomers and is reconstituted upon association of the two Fc chains.

62. The Fc-based chimeric protein complex of any one of above claims, wherein the Fc-based chimeric protein complex is a complex of two proteins.

63. The Fc-based chimeric protein complex of claim 62, wherein the complex comprises one or more fusion proteins.

64. The Fc-based chimeric protein complex of any one of above claims, wherein the Fc-based chimeric protein complex has a trans orientation/configuration, as relates to any targeting moiety and signaling agent, relative to each other, and/or any targeting moieties relative to each other, and/or any signaling agents relative to each other.

65. The Fc-based chimeric protein complex of any one of above claims, wherein the Fc-based chimeric protein complex has a cis orientation/configuration, as relates to any targeting moiety and signaling agent, relative to each other, and/or any targeting moieties relative to each other, and/or any signaling agents relative to each other.

66. An Fc-based chimeric protein complex comprising:
(a) a targeting moiety comprising a recognition domain that recognizes or binds to a target, wherein the targeting moiety is functional as a multimer of monomers;
(b) an Fc domain comprising two Fc chains, the two Fc chains each comprising one or more targeting moiety's monomers such that the functional multimer of monomers is reconstituted upon association of the two Fc chains, wherein the Fc domain optionally has one or more mutations that reduce or eliminate one or more effector functions of the Fc domain, promotes Fc chain pairing of the Fc domain, and/or stabilizes a hinge region in the Fc domain; and
(c) a human IFNγ or human TNFα signaling agent wherein the signaling agent is (i) a wild type human IFNγ or human TNFα signaling agent or (ii) a modified human IFNγ or human TNFα signaling agent that has one or more mutations that confer improved safety relative to the wild type human IFNγ or human TNFα signaling agent.

67. The Fc-based chimeric protein complex of claim 66, wherein the signaling agent is functional as a multimer of monomers and the two Fc chains each comprises one or more of signaling agent's monomers such that the functional multimer of monomers of the signaling agent is reconstituted upon association of the two Fc chains.

68. The Fc-based chimeric protein complex of claim 66 or 67, further comprising one or more linkers.

69. The Fc-based chimeric protein complex of claim 68, wherein at least one linker connects at least one targeting moiety monomer to the Fc chain or at least one signaling agent monomer to the Fc chain.

70. The Fc-based chimeric protein complex of claim 68, wherein at least one linker connects one targeting moiety monomer to another targeting moiety monomer or at least one linker connects one signaling agent monomer to another signaling agent monomer.

71. The Fc-based chimeric protein complex of claim 68, wherein at least one linker connects at least one targeting moiety monomer to at least one signaling agent or monomer thereof.

72. The Fc-based chimeric protein complex of claim 68, wherein a first linker connects at least one targeting moiety monomer to a first Fc chain and a second linker connects at least one targeting moiety monomer to a second Fc chain.

73. The Fc-based chimeric protein complex of claim 68, wherein a first linker connects at least one signaling agent monomer to a first Fc chain and a second linker connects at least one signaling agent monomer to a second Fc chain.

74. The Fc-based chimeric protein complex of claim 68, wherein at least one linker connects the signaling agent or a monomer thereof to the Fc chain.

75. The Fc-based chimeric protein complex of claim 66, wherein the targeting moiety is a dimeric targeting moiety and each monomer is linked to different Fc-chains.

76. The Fc-based chimeric protein complex of claim 66, wherein the targeting moiety is a trimeric targeting moiety and two monomers are linked to a first Fc-chain and one monomer is linked to a second Fc-chain.

77. The Fc-based chimeric protein complex of claim 66 or 67, wherein the Fc domain is selected from IgG, IgA, IgD, IgM, or IgE.

78. The Fc-based chimeric protein complex of claim 77, wherein the IgG is selected from IgG1, IgG2, IgG3, or IgG4.

79. The Fc-based chimeric protein complex of claim 77, wherein the Fc domain is selected from human IgG, IgA, IgD, IgM, or IgE.

80. The Fc-based chimeric protein complex of claim 79, wherein the human IgG is selected from human IgG1, IgG2, IgG3, or IgG4.

81. The Fc-based chimeric protein complex of any one of claims 66 to 80, wherein the human IFNγ or human TNFα signaling agent is wild type.

82. The Fc-based chimeric protein of claim 81, wherein the signaling agent is wild type IFNγ.

83. The Fc-based chimeric protein of claim 82, wherein the signaling agent is a wild type human IFNγ having an amino acid sequence of SEQ ID NO: 1563.

84. The Fc-based chimeric protein of any one of claims 66 to 80, wherein the human IFNγ or human TNFα signaling agent is a modified human IFNγ or human TNFα signaling agent.

85. The Fc-based chimeric protein complex of claim 84, wherein the mutations in the modified human IFNγ or human TNFα signaling agent allow for attenuation of activity of the human IFNγ or human TNFα signaling agent or affinity of the human IFNγ or human TNFα signaling agent for its receptor.

86. The Fc-based chimeric protein complex of claim 85, wherein agonistic or antagonistic activity is attenuated.

87. The Fc-based chimeric protein complex of claim 84, wherein the human IFNγ comprises one or more mutations selected from a truncation of about 16 amino acid residues at the C-terminus, a truncation about 15 amino acid residues at the C-terminus, a truncation of about 14 amino acid residues at the C-terminus, a truncation of about 7 amino acid residues at the C-terminus, a truncation of about 5 amino acid residues at the C-terminus, a truncation of about 5 to about 20 amino acids at the C-terminus, V5E, S20E, V22A, A23G, A23F, D24G, G26Q, H111A, H111D, I114A, Q115A, and A118G with respect to the amino acid sequence of SEQ ID NO: 1563.

88. The Fc-based chimeric protein complex of claim 84, wherein the human TNFα comprises one or more mutations selected from Y87F, R32G, N34G, Q67G, H73G, L75G, L75A, L75S, T77A, S86G, Y87Q, Y87L, Y87A, V91G, V91A, I97A, I97Q, 197S, T105G, P106G, A109Y, P113G, Y115G, Y115A, E127G, N137G, D143N, A145G, A145T, and Y87Q/197A with respect to the amino acid sequence of SEQ ID NO: 14.

89. The Fc-based chimeric protein complex of any one of claims 84-88, wherein the modified human IFNγ or human TNFα signaling agent has reduced affinity or activity at the human IFNγ or human TNFα signaling agent's receptor relative to a wild type human IFNγ or human TNFα signaling agent.

90. The Fc-based chimeric protein complex of any one of claims 84-89, wherein at least one monomer of the human IFNγ or human TNFα signaling agent is modified.

91. The Fc-based chimeric protein complex of any one of claims 84-89, wherein all monomers of the human IFNγ or human TNFα signaling agent are modified.

92. The Fc-based chimeric protein complex of claim 91, wherein each monomer of the human IFNγ or human TNFα signaling agent is modified with the same mutation.

93. The Fc-based chimeric protein complex of claim 91, wherein each monomer of the human IFNγ or human TNFα signaling agent is modified with different mutations.

94. The Fc-based chimeric protein complex of any one of claims 84 to 93, wherein the targeting moiety restores the modified human IFNγ or human TNFα signaling agent's affinity and/or activity at the human IFNγ or human TNFα signaling agent's receptor.

95. The Fc-based chimeric protein complex of any one of claims 84 to 93, wherein the targeting moiety restores the affinity and/or activity of at least one monomer of the multimeric human IFNγ or human TNFα signaling agent at the human IFNγ or human TNFα signaling agent's receptor.

96. The Fc-based chimeric protein complex of any one of the claims 66 to 95, wherein the Fc comprises L234A, L235A, and one additional mutation selected from K322A, K322Q, D265A, P329G, and P331S substitutions in human IgG1, wherein the numbering is based on the EU convention.

97. The Fc-based chimeric protein complex of any one claims 66 to 96, wherein the Fc comprises a S228P substitution in human IgG4, wherein the numbering is based on the EU convention.

98. The Fc-based chimeric protein complex of any one of claims 66 to 97, wherein the Fc chain pairing is promoted by ionic pairing and/or a knob-in-hole pairing.

99. The Fc-based chimeric protein complex of any one of claims 66 to 98, wherein the one or more mutations to the Fc domain results in an ionic pairing between the Fc chains in the Fc domain.

100. The Fc-based chimeric protein complex of any one of claims 66 to 99, wherein the one or more mutations to the Fc domain results in a knob-in-hole pairing of the Fc domain.

101. The Fc-based chimeric protein complex of any one of claims 66 to 100, wherein the one or more mutations to the Fc domain results in the reduction or elimination of the effector function of the Fc domain.

102. The Fc-based chimeric protein complex of any one of claims 66 to 101, wherein the targeting moiety comprises a recognition domain that recognizes and/or binds an antigen or receptor on a tumor cell, and/or tumor stroma, and/or ECM, and/or immune cell.

103. The Fc-based chimeric protein complex of claim 102, wherein the immune cell is selected from a T cell, a B cell, a dendritic cell, a macrophage, a neutrophil, and a NK cell.

104. The Fc-based chimeric protein complex of any one of claims 66 to 103, wherein the targeting moiety comprises a single-domain antibody, a recombinant heavy-chain-only antibody (VHH), a single-chain antibody (scFv), a shark heavy-chain-only antibody (VNAR), a microprotein, a darpin, an anticalin, an adnectin, an aptamer, a Fv, a Fab, a Fab′, a F(ab′)₂, a peptide mimetic molecule, a natural ligand for a receptor, or a synthetic molecule.

105. The Fc-based chimeric protein complex of any one of claims 66 to 104, wherein the targeting moiety comprises a natural ligand for a receptor that is a cytokine.

106. The Fc-based chimeric protein complex of any one of claims 66 to 105, wherein the targeting moiety recognizes and/or binds to its target without substantially neutralizing the target's activity or wherein the targeting moiety recognizes and/or binds to its target and substantially neutralizes the target's activity.

107. The Fc-based chimeric protein complex of any one of claims 66 to 106, wherein the targeting moiety directly or indirectly recruits immune cells to tumor cells or to the tumor microenvironment.

108. The Fc-based chimeric protein complex of any one of claims 66 to 107, wherein the targeting moiety enhances antigen presentation.

109. The Fc-based chimeric protein complex of any one of claims 66 to 108, wherein the targeting moiety enhances tumor antigen presentation, optionally by dendritic cells.

110. The Fc-based chimeric protein complex of any one of claims 66 to 109, wherein the targeting moiety is Flt3 ligand or XCL1 or XCL2.

111. The Fc-based chimeric protein complex of any one of claims 66 to 110, wherein the signaling agent or the targeting moiety is homomeric or heteromeric.

112. The Fc-based chimeric protein complex of any one of claims 66 to 111, wherein the signaling agent or the targeting moiety is a homomeric dimer, a homomeric trimer, a heteromeric dimer, or a heteromeric trimer.

113. The Fc-based chimeric protein complex of claim 66 or 67, wherein the Fc domain is homodimeric.

114. The Fc-based chimeric protein complex of claim 66 or 67, wherein the Fc domain is heterodimeric.

115. The Fc-based chimeric protein complex of claim 84, wherein the signaling agent is a modified IFNγ, optionally having a deletion of last 16 C-terminal amino acids with respect to the amino acid sequence of SEQ ID NO: 1563.

116. The Fc-based chimeric protein of claim 84, wherein the signaling agent is a modified TNFα, optionally having a Y87F mutation with respect to the amino acid sequence of SEQ ID NO: 14.

117. The Fc-based chimeric protein complex claim 66 or 67, wherein the chimeric protein complex further comprises a second targeting moiety.

118. The Fc-based chimeric protein complex of claim 117, wherein the second targeting moiety binds to one of the following targets: Clec9A, CD8, CD13, CD20, Clec4c, PD-1, PD-L1, PD-L2, SIRP1α, FAP, XCR1, tenascin CA1, Flt3, or an ECM protein.

119. The Fc-based chimeric protein complex of any one of claims 66 to 118, wherein the chimeric protein complex further comprises a second signaling agent.

120. The Fc-based chimeric protein complex of claim 119, wherein the second signaling agent is a wild type or modified signaling agent.

121. The Fc-based chimeric protein complex of claim 120, wherein the second signaling agent is selected from human: IFNγ and TNFα.

122. The Fc-based chimeric protein complex of claim 121, wherein the second signaling agent is functional as a multimer of monomers and is reconstituted upon association of the two Fc chains.

123. The Fc-based chimeric protein complex of any one of claims 66 to 122, wherein the Fc-based chimeric protein complex has a trans orientation/configuration, as relates to any targeting moiety and signaling agent, relative to each other, and/or any targeting moieties relative to each other, and/or any signaling agents relative to each other.

124. The Fc-based chimeric protein complex of any one of claims 66 to 122, wherein the Fc-based chimeric protein complex has a cis orientation/configuration, as relates to any targeting moiety and signaling agent, relative to each other, and/or any targeting moieties relative to each other, and/or any signaling agents relative to each other.

125. A nucleic acid encoding an Fc-based chimeric protein complex of any one of claims 1 to 124.

126. A host cell comprising the nucleic acid of claim 125.

127. A method for treating or preventing cancer, comprising administering to a patient in need thereof an effective amount of the Fc-based chimeric protein complex of any one of claims 1 to 124.

128. A use of the Fc-based chimeric protein complex of any one of claims 1 to 124 for treating or preventing cancer.

129. A use of the Fc-based chimeric protein complex of any one of claims 1 to 124 for the preparation of a medicament for the treatment of prevention of cancer.

130. The method of claim 127 or the use of claim 128 or claim 129, wherein the cancer is selected form one or more of basal cell carcinoma, biliary tract cancer; bladder cancer; bone cancer; brain and central nervous system cancer; breast cancer; cancer of the peritoneum; cervical cancer; choriocarcinoma; colon and rectum cancer; connective tissue cancer; cancer of the digestive system; endometrial cancer; esophageal cancer; eye cancer; cancer of the head and neck; gastric cancer (including gastrointestinal cancer); glioblastoma; hepatic carcinoma; hepatoma; intra-epithelial neoplasm; kidney or renal cancer; larynx cancer; leukemia; liver cancer; lung cancer (e.g., small-cell lung cancer, non-small cell lung cancer, adenocarcinoma of the lung, and squamous carcinoma of the lung); melanoma; myeloma; neuroblastoma; oral cavity cancer (lip, tongue, mouth, and pharynx); ovarian cancer; pancreatic cancer; prostate cancer; retinoblastoma; rhabdomyosarcoma; rectal cancer; cancer of the respiratory system; salivary gland carcinoma; sarcoma; skin cancer; squamous cell cancer; stomach cancer; testicular cancer; thyroid cancer; uterine or endometrial cancer; cancer of the urinary system; vulval cancer; lymphoma including Hodgkin's and non-Hodgkin's lymphoma, as well as B-cell lymphoma (including low grade/follicular non-Hodgkin's lymphoma (NHL); small lymphocytic (SL) NHL; intermediate grade/follicular NHL; intermediate grade diffuse NHL; high grade immunoblastic NHL; high grade lymphoblastic NHL; high grade small non-cleaved cell NHL; bulky disease NHL; mantle cell lymphoma; AIDS-related lymphoma; and Waldenstrom's Macroglobulinemia; chronic lymphocytic leukemia (CLL); acute lymphoblastic leukemia (ALL); Hairy cell leukemia; chronic myeloblastic leukemia; as well as other carcinomas and sarcomas; and post-transplant lymphoproliferative disorder (PTLD), as well as abnormal vascular proliferation associated with phakomatoses; edema (e.g. that associated with brain tumors); and Meigs' syndrome.

131. A method for treating or preventing an autoimmune disease, neurodegenerative disease, metabolic disease, and/or cardiovascular disease, comprising administering to a patient in need thereof an effective amount of the Fc-based chimeric protein complex of any one of claims 1 to 124.

132. A use of the Fc-based chimeric protein complex of any one of claims 1 to 124 for treating or preventing an autoimmune disease, neurodegenerative disease, metabolic disease, and/or cardiovascular disease.

133. A use of the Fc-based chimeric protein complex of any one of claims 1 to 124 for the preparation of a medicament for the treatment of prevention of an autoimmune disease, neurodegenerative disease, metabolic disease, and/or cardiovascular disease.

134. The method of claim 131 or the use of claim 132 or claim 133, wherein the autoimmune disease, neurodegenerative disease, metabolic disease, and/or cardiovascular disease is selected from multiple sclerosis, diabetes mellitus, lupus, celiac disease, Crohn's disease, ulcerative colitis, Guillain-Barre syndrome, scleroderms, Goodpasture's syndrome, Wegener's granulomatosis, autoimmune epilepsy, Rasmussen's encephalitis, Primary biliary sclerosis, Sclerosing cholangitis, Autoimmune hepatitis, Addison's disease, Hashimoto's thyroiditis, Fibromyalgia, Menier's syndrome; transplantation rejection (e.g., prevention of allograft rejection) pernicious anemia, rheumatoid arthritis, systemic lupus erythematosus, dermatomyositis, Sjogren's syndrome, lupus erythematosus, myasthenia gravis, Reiter's syndrome, and Grave's disease.

The application's sequence listing, which the Patent Office published only in electronic form, follows.

SEQUENCE LISTING (1581 sequences)

SEQ ID NO: 1 - protein, 165 aa, synthetic construct
  REGION 1..165: note = Synthetic Sequence (IFN-alpha2a)
CDLPQTHSLGSRRTLMLLAQMRKISLFSCLKDRHDFGFPQEEFGNQFQKAETIPVLHEMIQQIFNLFSTKDSSAAWDETLLDKFYTELYQQLNDLEACVIQGVGVTETPLMKEDSILAVRKYFQRITLYLKEKKYSPCAWEVVRAEIMRSFSLSTNLQESLRSKE

SEQ ID NO: 2 - protein, 165 aa, synthetic construct [sequence omitted]

SEQ ID NO: 3 - protein, 166 aa, Homo sapiens
  REGION 1..166: note = MISC_FEATURE - human IFN-beta
MSYNLLGFLQRSSNFQCQKLLWQLNGRLEYCLKDRMNFDIPEEIKQLQQFQKEDAALTIYEMLQNIFAIFRQDSSSTGWNETIVENLLANVYHQINHLKTVLEEKLEKEDFTRGKLMSSLHLKRYYGRILHYLKAKEYSHCAWTIVRVEILRNFYFINRLTGYLRN

SEQ ID NO: 4 - protein, 167 aa, synthetic construct
  REGION 1..167: note = Synthetic Sequence (consensus interferon)
MCDLPQTHSLGNRRALILLAQMRRISPFSCLKDRHDFGFPQEEFDGNQFQKAQAISVLHEMIQQTFNLFSTKDSSAAWDESLLEKFYTELYQQLNDLEACVIQEVGVEETPLMNVDSILAVKKYFQRITLYLTEKKYSPCAWEVVRAEIMRSFSLSTNLQERLRRKE

SEQ ID NO: 5 - protein, 166 aa, synthetic construct
  REGION 1..166: note = Synthetic Sequence (consensus interferon)
CDLPQTHSLGNRRALILLAQMRRISPFSCLKDRHDFGFPQEEFDGNQFQKAQAISVLHEMIQQTFNLFSTKDSSAAWDESLLEKFYTELYQQLNDLEACVIQEVGVEETPLMNVDSILAVKKYFQRITLYLTEKKYSPCAWEVVRAEIMRSFSLSTNLQERLRRKE

SEQ ID NO: 6 - protein, 166 aa, synthetic construct
  REGION 1..166: note = Synthetic Sequence (IFN-CON2)
CDLPQTHSLGNRRTLMLLAQMRRISPFSCLKDRHDFGFPQEEFDGNQFQKAQAISVLHEMIQQTFNLFSTKDSSAAWDESLLEKFYTELYQQLNDLEACVIQEVGVEETPLMNVDSILAVKKYFQRITLYLTEKKYSPCAWEVVRAEIMRSFSLSTNLQERLRRKE

SEQ ID NO: 7 - protein, 166 aa, synthetic construct
  REGION 1..166: note = Synthetic Sequence (IFN-CON3)
CDLPQTHSLGNRRALILLAQMRRISPFSCLKDRHDFGFPQEEFDGNQFQKAQAISVLHEMIQQTFNLFSTKDSSAAWDESLLEKFYTELYQQLNDLEACVIQEVGVEETPLMNEDSILAVRKYFQRITLYLTEKKYSPCAWEVVRAEIMRSFSLSTNLQERLRRKE

SEQ ID NO: 8 - protein, 167 aa, synthetic construct
  REGION 1..167: note = Synthetic Sequence (consensus variant)
MCDLPQTHSLGNRRALILLAQMRRISPFSCLKDRHDFGFPQEEFDGNQFQKAQAISVLHEMIQQTFNLFSTKDSSAAWDESLLEKFYTELYQQLNDLEACVIQEVGVEETPLMNEDSILAVRKYFQRITLYLTEKKYSPCAWEVVRAEIMRSFSLSTNLQERLRRKE

SEQ ID NO: 9 - protein, 167 aa, synthetic construct
  REGION 1..167: note = Synthetic Sequence (consensus interferon variant)
MCDLPQTHSLGNRRALILLAQMRRISPFSCLKDRHDFGFPQEEFDGNQFQKAQAISVLHEMIQQTFNLFSTKDSSAAWDESLLEKFYTELYQQLNDLEACVIQEVGVEETPLMNEDSILAVRKYFQRITLYLTEKKYSPCAWEVVRAEIMRSFSLCTNLQERLRRKE

SEQ ID NO: 10 - protein, 6 aa, synthetic construct
  REGION 1..6: note = Synthetic Sequence (consensus interferon variant)
EEFGNQ

SEQ ID NO: 11 - protein, 7 aa, synthetic construct
  REGION 1..7: note = Synthetic Sequence (consensus interferon variant)
EEFDGNQ

SEQ ID NO: 12 - protein, 165 aa, synthetic construct
  REGION 1..165: note = Synthetic Sequence (wild type amino acid sequence of VEGF165)
APMAEGGGQNHHEVVKFMDVYQRSYCHPIETLVDIFQEYPDEIEYIFKPSCVPLMRCGGCCNDEGLECVPTEESNITMQIMRIKPHQGQHIGEMSFLQHNKCECRPKKDRARQENPCGPCSERRKHLFVQDPQTCKCSCKNTDSRCKARQLELNERTCRCDKPRR

SEQ ID NO: 13 - protein, 165 aa, synthetic construct
  REGION 1..165: note = Synthetic Sequence (wild type amino acid sequence of VEGF165b )
APMAEGGGQNHHEVVKFMDVYQRSYCHPIETLVDIFQEYPDEIEYIFKPSCVPLMRCGGCCNDEGLECVPTEESNITMQIMRIKPHQGQHIGEMSFLQHNKCECRPKKDRARQENPCGPCSERRKHLFVQDPQTCKCSCKNTDSRCKARQLELNERTCRSLTRKD

SEQ ID NO: 14 - protein, 157 aa, synthetic construct [sequence omitted]

SEQ ID NO: 15 - protein, 171 aa, synthetic construct
  REGION 1..171: note = Synthetic Sequence (wild type TNF-beta)
LPGVGLTPSAAQTARQHPKMHLAHSNLKPAAHLIGDPSKQNSLLWRANTDRAFLQDGFSLSNNSLLVPTSGIYFVYSQVVFSGKAYSPKATSSPLYLAHEVQLFSSQYPFHVPLLSSQKMVYPGLQEPWLHSMYHGAAFQLTQGDQLSTHTDGIPHLVLSPSTVFFGAFAL

SEQ ID NO: 16 - protein, 281 aa, synthetic construct [sequence omitted]

SEQ ID NO: 17 - protein, 153 aa, synthetic construct
  REGION 1..153: note = Synthetic Sequence (wild type IL-1beta)
APVRSLNCTLRDSQQKSLVMSGPYELKALHLQGQDMEQQVVFSMSFVQGEESNDKIPVALGLKEKNLYLSCVLKDDKPTLQLESVDPKNYPKKKMEKRFVFNKIEINNKLEFESAQFPNWYISTSQAENMPVFLGGTKGGQDITDFTMQFVSS

SEQ ID NO: 18 - protein, 133 aa, synthetic construct [sequence omitted]

SEQ ID NO: 19 - protein, 129 aa, synthetic construct [sequence omitted]

SEQ ID NO: 20 - protein, 185 aa, synthetic construct
  REGION 1..185: note = Synthetic Sequence (wild type IL-6)
APVPPGEDSKDVAAPHRQPLTSSERIDKQIRYILDGISALRKETCNKSNMCESSKEALAENNLNLPKMAEKDGCFQSGFNEETCLVKIITGLLEFEVYLEYLQNRFESSEEQARAVQMSTKVLIQFLQKKAKNLDAITTPDPTTNASLTTKLQAQNQWLQDMTTHLILRSFKEFLQSSLRALRQM

SEQ ID NO: 21 - protein, 114 aa, synthetic construct
  REGION 1..114: note = Synthetic Sequence (wild type IL-13)
SPGPVPPSTALRELIEELVNITQNQKAPLCNGSMVWSINLTAGMYCAALESLINVSGCSAIEKTQRMLSGFCPHKVSAGQFSSLHVRDTKIEVAQFVKDLLLHLKKLFREGRFN

SEQ ID NO: 22 - protein, 194 aa, synthetic construct
  REGION 1..194: note = Synthetic Sequence (wild type IL-18)
MAAEPVEDNCINFVAMKFIDNTLYFIAEDDENLESDYFGKLESKLSVIRNLNDQVLFIDQGNRPLFEDMTDSDCRDNAPRTIFIISMYKDSQPRGMAVTISVKCEKISTLSCENKIISFKEMNPPDNIKDTKSDIIFFQRSVPGHDNKMQFESSSYEGYFLACEKERDLFKLILKKEDELGDRSIMFTVQNEDL

SEQ ID NO: 23 - protein, 270 aa, synthetic construct
  REGION 1..270: note = Synthetic Sequence (wild type IL-33)
MKPKMKYSTNKISTAKWKNTASKALCFKLGKSQQKAKEVCPMYFMKLRSGLMIKKEACYFRRETTKRPSLKTGRKHKRHLVLAACQQQSTVECFAFGISGVQKYTRALHDSSITGISPITEYLASLSTYNDQSITFALEDESYEIYVEDLKKDEKKDKVLLSYYESQHPSNESGDGVDGKMLMVTLSPTKDFWLHANNKEHSVELHKCEKPLPDQAFFVLHNMHSNCVSFECKTDPGVFIGVKDNHLALIKVDSSENLCTENILFKLSET

SEQ ID NO: 24 - protein, 193 aa, Homo sapiens
  REGION 1..193: note = MISC_FEATURE - human EPO (the first 27 amino acids are the signal peptide)
MGVHECPAWLWLLLSLLSLPLGLPVLGAPPRLICDSRVLERYLLEAKEAENITTGCAEHCSLNENITVPDTKVNFYAWKRMEVGQQAVEVWQGLALLSEAVLRGQALLVNSSQPWEPLQLHVDKAVSGLRSLTTLLRALGAQKEAISPPDAASAAPLRTITADTFRKLFRVYSNFLRGKLKLYTGEACRTGDR

SEQ ID NO: 25 - protein, 166 aa, Homo sapiens
  REGION 1..166: note = MISC_FEATURE - mature form of human EPO
APPRLICDSRVLERYLLEAKEAENITTGCAEHCSLNENITVPDTKVNFYAWKRMEVGQQAVEVWQGLALLSEAVLRGQALLVNSSQPWEPLQLHVDKAVSGLRSLTTLLRALGAQKEAISPPDAASAAPLRTITADTFRKLFRVYSNFLRGKLKLYTGEACRTGDR

SEQ ID NO: 26 - protein, 241 aa, Homo sapiens
  REGION 1..241: note = MISC_FEATURE - human Clec9A
MHEEEIYTSLQWDSPAPDTYQKCLSSNKCSGACCLVMVISCVFCMGLLTASIFLGVKLLQVSTIAMQQQEKLIQQERALLNFTEWKRSCALQMKYCQAFMQNSLSSAHNSSPCPNNWIQNRESCYYVSEIWSIWHTSQENCLKEGSTLLQIESKEEMDFITGSLRKIKGSYDYWVGLSQDGHSGRWLWQDGSSPSPGLLPAERSQSANQVCGYVKSNSLLSSNCSTWKYFICEKYALRSSV

SEQ ID NO: 27 - protein, 10 aa, synthetic construct
  REGION 1..10: note = Synthetic Sequence
GSISSINVMG

SEQ ID NO: 28 - protein, 10 aa, synthetic construct
  REGION 1..10: note = Synthetic Sequence
GSFSSINVMG

SEQ ID NO: 29 - protein, 10 aa, synthetic construct
  REGION 1..10: note = Synthetic Sequence
GSISSINIMG

SEQ ID NO: 30 - protein, 10 aa, synthetic construct
  REGION 1..10: note = Synthetic Sequence
GSISSINIMG

SEQ ID NO: 31 - protein, 10 aa, synthetic construct
  REGION 1..10: note = Synthetic Sequence
VSIFSINAMG

SEQ ID NO: 32 - protein, 10 aa, synthetic construct
  REGION 1..10: note = Synthetic Sequence
GSIFSLNAMG

SEQ ID NO: 33 - protein, 10 aa, synthetic construct
  REGION 1..10: note = Synthetic Sequence
GRTISNYDMA

SEQ ID NO: 34 - protein, 10 aa, synthetic construct
  REGION 1..10: note = Synthetic Sequence
GRTFTTSLMQ

SEQ ID NO: 35 - protein, 10 aa, synthetic construct
  REGION 1..10: note = Synthetic Sequence
ERNLRIYDMA

SEQ ID NO: 36 - protein, 10 aa, synthetic construct
  REGION 1..10: note = Synthetic Sequence
ERNLRSYDMA

SEQ ID NO: 37 - protein, 10 aa, synthetic construct
  REGION 1..10: note = Synthetic Sequence
GLTFSNYHMG

SEQ ID NO: 38 - protein, 10 aa, synthetic construct
  REGION 1..10: note = Synthetic Sequence
GLTFSSYHMG

SEQ ID NO: 39 - protein, 10 aa, synthetic construct
  REGION 1..10: note = Synthetic Sequence
GLTFSRYHMG

SEQ ID NO: 40 - protein, 10 aa, synthetic construct
  REGION 1..10: note = Synthetic Sequence
GLTLSSYYIA

SEQ ID NO: 41 - protein, 10 aa, synthetic construct
  REGION 1..10: note = Synthetic Sequence
GLTFSSYYTG

SEQ ID NO: 42 - protein, 10 aa, synthetic construct
  REGION 1..10: note = Synthetic Sequence
GLTLSSYHMG

SEQ ID NO: 43 - protein, 10 aa, synthetic construct
  REGION 1..10: note = Synthetic Sequence
GRTSSPYVTG

SEQ ID NO: 44 - protein, 10 aa, synthetic construct
  REGION 1..10: note = Synthetic Sequence
GFTFSGYVMS

SEQ ID NO: 45 - protein, 10 aa, synthetic construct
  REGION 1..10: note = Synthetic Sequence
GFTFSGYVMT

SEQ ID NO: 46 - protein, 10 aa, synthetic construct
  REGION 1..10: note = Synthetic Sequence
GFTFSGYLMS

SEQ ID NO: 47 - protein, 10 aa, synthetic construct
  REGION 1..10: note = Synthetic Sequence
GRISSINSMG

SEQ ID NO: 48 - protein, 10 aa, synthetic construct
  REGION 1..10: note = Synthetic Sequence
GSITSINAMG

SEQ ID NO: 49 - protein, 10 aa, synthetic construct
  REGION 1..10: note = Synthetic Sequence
GRFFRVNAMG

SEQ ID NO: 50 - protein, 10 aa, synthetic construct
  REGION 1..10: note = Synthetic Sequence
GSSDSINAMG

SEQ ID NO: 51 - protein, 10 aa, synthetic construct
  REGION 1..10: note = Synthetic Sequence
GSVFSINAWG

SEQ ID NO: 52 - protein, 10 aa, synthetic construct
  REGION 1..10: note = Synthetic Sequence
GSILSINSMG

SEQ ID NO: 53 - protein, 10 aa, synthetic construct
  REGION 1..10: note = Synthetic Sequence
VSISSINSMG

SEQ ID NO: 54 - protein, 10 aa, synthetic construct
  REGION 1..10: note = Synthetic Sequence
GRVFSINAMG

SEQ ID NO: 55 - protein, 10 aa, synthetic construct
  REGION 1..10: note = Synthetic Sequence
VNIDTLNSMA

SEQ ID NO: 56 - protein, 10 aa, synthetic construct
  REGION 1..10: note = Synthetic Sequence
GGISSINSMG

SEQ ID NO: 57 - protein, 10 aa, synthetic construct
  REGION 1..10: note = Synthetic Sequence
GSMHSVNSMA

SEQ ID NO: 58 - protein, 10 aa, synthetic construct
  REGION 1..10: note = Synthetic Sequence
GDISSINAMG

SEQ ID NO: 59 - protein, 10 aa, synthetic construct
  REGION 1..10: note = Synthetic Sequence
GSIFSIDAMG

SEQ ID NO: 60 - protein, 10 aa, synthetic construct
  REGION 1..10: note = Synthetic Sequence
GSIFSINAMG

SEQ ID NO: 61 - protein, 10 aa, synthetic construct
  REGION 1..10: note = Synthetic Sequence
GSIFSIAAMG

SEQ ID NO: 62 - protein, 10 aa, synthetic construct
  REGION 1..10: note = Synthetic Sequence
GNIASITAMG

SEQ ID NO: 63 - protein, 10 aa, synthetic construct
  REGION 1..10: note = Synthetic Sequence
GFTFDDYAIG

SEQ ID NO: 64 - protein, 10 aa, synthetic construct
  REGION 1..10: note = Synthetic Sequence
GSISSINAMG

SEQ ID NO: 65 - protein, 10 aa, synthetic construct
  REGION 1..10: note = Synthetic Sequence
VSIFRSYFMG

SEQ ID NO: 66 - protein, 10 aa, synthetic construct
  REGION 1..10: note = Synthetic Sequence
GSIVSINAIG

SEQ ID NO: 67 - protein, 10 aa, synthetic construct
  REGION 1..10: note = Synthetic Sequence
GSIFSINAMG

SEQ ID NO: 68 - protein, 10 aa, synthetic construct
  REGION 1..10: note = Synthetic Sequence
RSFSSFNAMG

SEQ ID NO: 69 - protein, 10 aa, synthetic construct
  REGION 1..10: note = Synthetic Sequence
GSFSSINAMG

SEQ ID NO: 70 - protein, 10 aa, synthetic construct
  REGION 1..10: note = Synthetic Sequence
GTSFSINGMA

SEQ ID NO: 71 - protein, 10 aa, synthetic construct
  REGION 1..10: note = Synthetic Sequence
GRTFSTYAMG

SEQ ID NO: 72 - protein, 10 aa, synthetic construct
  REGION 1..10: note = Synthetic Sequence
GSIFSINAMG

SEQ ID NO: 73 - protein, 10 aa, synthetic construct
  REGION 1..10: note = Synthetic Sequence
GRIFDINAMG

SEQ ID NO: 74 - protein, 10 aa, synthetic construct
  REGION 1..10: note = Synthetic Sequence
GTLFSINGMA

SEQ ID NO: 75 - protein, 10 aa, synthetic construct
  REGION 1..10: note = Synthetic Sequence
GSIDSINAMG

SEQ ID NO: 76 - protein, 10 aa, synthetic construct
  REGION 1..10: note = Synthetic Sequence
GRAFSTNSMG

SEQ ID NO: 77 - protein, 10 aa, synthetic construct
  REGION 1..10: note = Synthetic Sequence
GSIISINSMG

SEQ ID NO: 78 - protein, 10 aa, synthetic construct
  REGION 1..10: note = Synthetic Sequence
RNFFSINAMG

SEQ ID NO: 79 - protein, 10 aa, synthetic construct
  REGION 1..10: note = Synthetic Sequence
GRFFRVNAMG

SEQ ID NO: 80 - protein, 10 aa, synthetic construct
  REGION 1..10: note = Synthetic Sequence
GSIVSINSMG

SEQ ID NO: 81 - protein, 10 aa, synthetic construct
  REGION 1..10: note = Synthetic Sequence
GSIFSINAMG

SEQ ID NO: 82 - protein, 10 aa, synthetic construct
  REGION 1..10: note = Synthetic Sequence
GSIIGINSMG

SEQ ID NO: 83 - protein, 10 aa, synthetic construct
  REGION 1..10: note = Synthetic Sequence
GRTFPGYVMA

SEQ ID NO: 84 - protein, 10 aa, synthetic construct
  REGION 1..10: note = Synthetic Sequence
GSIFSINAMG

SEQ ID NO: 85 - protein, 10 aa, synthetic construct
  REGION 1..10: note = Synthetic Sequence
GRTFSINAMG

SEQ ID NO: 86 - protein, 10 aa, synthetic construct
  REGION 1..10: note = Synthetic Sequence
GRTLSSYTIG

SEQ ID NO: 87 - protein, 10 aa, synthetic construct
  REGION 1..10: note = Synthetic Sequence
GSFFSINAMG

SEQ ID NO: 88 - protein, 10 aa, synthetic construct
  REGION 1..10: note = Synthetic Sequence
GSIFSINSMG

SEQ ID NO: 89 - protein, 10 aa, synthetic construct
  REGION 1..10: note = Synthetic Sequence
GSIFSFNAMG

SEQ ID NO: 90 - protein, 10 aa, synthetic construct
  REGION 1..10: note = Synthetic Sequence
GSIFSINAMG

SEQ ID NO: 91 - protein, 10 aa, synthetic construct
  REGION 1..10: note = Synthetic Sequence
GRTFSTYAMA

SEQ ID NO: 92 - protein, 10 aa, synthetic construct
  REGION 1..10: note = Synthetic Sequence
GSFFSINAMG

SEQ ID NO: 93 - protein, 10 aa, synthetic construct
  REGION 1..10: note = Synthetic Sequence
VNIGSLNSMV

SEQ ID NO: 94 - protein, 10 aa, synthetic construct
  REGION 1..10: note = Synthetic Sequence
GRTLSNYAVG

SEQ ID NO: 95 - protein, 10 aa, synthetic construct
  REGION 1..10: note = Synthetic Sequence
GSISSINAMG

SEQ ID NO: 96 - protein, 10 aa, synthetic construct
  REGION 1..10: note = Synthetic Sequence
GRFFRVNAMG

SEQ ID NO: 97 - protein, 10 aa, synthetic construct
  REGION 1..10: note = Synthetic Sequence
GSVFSINAMG

SEQ ID NO: 98 - protein, 10 aa, synthetic construct
  REGION 1..10: note = Synthetic Sequence
GSIFEINSIG

SEQ ID NO: 99 - protein, 10 aa, synthetic construct
  REGION 1..10: note = Synthetic Sequence
GSIFNINSMG

SEQ ID NO: 100 - protein, 10 aa, synthetic construct
  REGION 1..10: note = Synthetic Sequence
VNIGTLNSMA

SEQ ID NO: 101 - protein, 10 aa, synthetic construct
  REGION 1..10: note = Synthetic Sequence
GSIFSINSMG

SEQ ID NO: 102 - protein, 10 aa, synthetic construct
  REGION 1..10: note = Synthetic Sequence
GRIGSINSMG

SEQ ID NO: 103 - protein, 10 aa, synthetic construct
  REGION 1..10: note = Synthetic Sequence
GSIFSFNAMG

SEQ ID NO: 104 - protein, 10 aa, synthetic construct
  REGION 1..10: note = Synthetic Sequence
GRISSINSMG

SEQ ID NO: 105 - protein, 10 aa, synthetic construct
  REGION 1..10: note = Synthetic Sequence
GRTLSNYAVA

SEQ ID NO: 106 - protein, 10 aa, synthetic construct
  REGION 1..10: note = Synthetic Sequence
GRIGSINSMG

SEQ ID NO: 107 - protein, 10 aa, synthetic construct
  REGION 1..10: note = Synthetic Sequence
RSFFSFNAMG

SEQ ID NO: 108 - protein, 10 aa, synthetic construct
  REGION 1..10: note = Synthetic Sequence
GRFFRVNAMG

SEQ ID NO: 109 - protein, 10 aa, synthetic construct
  REGION 1..10: note = Synthetic Sequence
GIIFSINAMG

SEQ ID NO: 110 - protein, 10 aa, synthetic construct
  REGION 1..10: note = Synthetic Sequence
GRTLSNYAVA

SEQ ID NO: 111 - protein, 10 aa, synthetic construct
  REGION 1..10: note = Synthetic Sequence
GRIFSVNAMG

SEQ ID NO: 112 - protein, 10 aa, synthetic construct
  REGION 1..10: note = Synthetic Sequence
GRTFSSYAMA

SEQ ID NO: 113 - protein, 16 aa, synthetic construct
  REGION 1..16: note = Synthetic Sequence
RITNLGLPNYADWLKD

SEQ ID NO: 114 - protein, 16 aa, synthetic construct
  REGION 1..16: note = Synthetic Sequence
RITNLGLPNYADSVTG

SEQ ID NO: 115 - protein, 16 aa, synthetic construct
  REGION 1..16: note = Synthetic Sequence
RITNIGLPNYADSVKG

SEQ ID NO: 116 - protein, 16 aa, synthetic construct
  REGION 1..16: note = Synthetic Sequence
RITNLGLPNYADSVEG

SEQ ID NO: 117 - protein, 16 aa, synthetic construct
  REGION 1..16: note = Synthetic Sequence
AITSGGRVVYSDSVKG

SEQ ID NO: 118 - protein, 16 aa, synthetic construct
  REGION 1..16: note = Synthetic Sequence
AITSGGRTAYADSVKG

SEQ ID NO: 119 - protein, 16 aa, synthetic construct
  REGION 1..16: note = Synthetic Sequence
HITSDGRIVYADPVKG

SEQ ID NO: 120 - protein, 17 aa, synthetic construct
  REGION 1..17: note = Synthetic Sequence
RISGSGDRTDYADSVKG

SEQ ID NO: 121 - protein, 17 aa, synthetic construct
  REGION 1..17: note = Synthetic Sequence
SITWSTGNTHYADSVKG

SEQ ID NO: 122 - protein, 17 aa, synthetic construct
  REGION 1..17: note = Synthetic Sequence
VISSSGDSTHYSDFVKG

SEQ ID NO: 123 - protein, 17 aa, synthetic construct
  REGION 1..17: note = Synthetic Sequence
VITSSGDSTHYSDFVKG

SEQ ID NO: 124 - protein, 17 aa, synthetic construct
  REGION 1..17: note = Synthetic Sequence
QITWSDASIYYAGSVKG

SEQ ID NO: 125 - protein, 17 aa, synthetic construct
  REGION 1..17: note = Synthetic Sequence
QITWSDTSIYYAGSVKG

SEQ ID NO: 126 - protein, 17 aa, synthetic construct
  REGION 1..17: note = Synthetic Sequence
QITWSDGTTYYPGSVKG

SEQ ID NO: 127 - protein, 17 aa, synthetic construct
  REGION 1..17: note = Synthetic Sequence
QIRWSDDSTYYPGSVKG

SEQ ID NO: 128 - protein, 17 aa, synthetic construct
  REGION 1..17: note = Synthetic Sequence
QISWSDDSTYYADSVKG

SEQ ID NO: 129 - protein, 16 aa, synthetic construct
  REGION 1..16: note = Synthetic Sequence
TVSWGGVTYYADSVKG

SEQ ID NO: 130 - protein, 17 aa, synthetic construct
  REGION 1..17: note = Synthetic Sequence
SIGSGGGYPSYTDSVEG

SEQ ID NO: 131 - protein, 17 aa, synthetic construct
  REGION 1..17: note = Synthetic Sequence
SIGSGGGYPSYTGSVEG

SEQ ID NO: 132 - protein, 17 aa, synthetic construct
  REGION 1..17: note = Synthetic Sequence
HIGSGGGYPSYTDSVQG

SEQ ID NO: 133 - protein, 17 aa, synthetic construct
  REGION 1..17: note = Synthetic Sequence
HIGSGGGHATYTDSVEG

SEQ ID NO: 134 - protein, 17 aa, synthetic construct
  REGION 1..17: note = Synthetic Sequence
TIGSGGGITSYADSVKG

SEQ ID NO: 135 - protein, 16 aa, synthetic construct
  REGION 1..16: note = Synthetic Sequence
AITNGGAKTYADSVKG

SEQ ID NO: 136 - protein, 16 aa, synthetic construct
  REGION 1..16: note = Synthetic Sequence
AITSGGRLSYADSVKG

SEQ ID NO: 137 - protein, 16 aa, synthetic construct
  REGION 1..16: note = Synthetic Sequence
AITNGGQTAYADSVKG

SEQ ID NO: 138 - protein, 16 aa, synthetic construct
  REGION 1..16: note = Synthetic Sequence
AITSGGRSTYIDSAKG

SEQ ID NO: 139 - protein, 16 aa, synthetic construct
  REGION 1..16: note = Synthetic Sequence
AITNQGRIAYAPSVNG

SEQ ID NO: 140 - protein, 16 aa, synthetic construct
  REGION 1..16: note = Synthetic Sequence
AITNDGRTTYVDSVKG

SEQ ID NO: 141 - protein, 16 aa, synthetic construct
  REGION 1..16: note = Synthetic Sequence
AVTVGGRYAYADSAKN

SEQ ID NO: 142 - protein, 16 aa, synthetic construct
  REGION 1..16: note = Synthetic Sequence
AITNQGATTYADSVKG

SEQ ID NO: 143 - protein, 16 aa, synthetic construct
  REGION 1..16: note = Synthetic Sequence
GITGSGQITYANSVRG

SEQ ID NO: 144 - protein, 16 aa, synthetic construct
  REGION 1..16: note = Synthetic Sequence
AITNGGRTVYGDSVKG

SEQ ID NO: 145 - protein, 16 aa, synthetic construct
  REGION 1..16: note = Synthetic Sequence
AITSGGRLAYAPSVNG

SEQ ID NO: 146 - protein, 16 aa, synthetic construct
  REGION 1..16: note = Synthetic Sequence
AITNGGRTTYVDSVKG

SEQ ID NO: 147 - protein, 16 aa, synthetic construct
  REGION 1..16: note = Synthetic Sequence
AITTGGRTTYVDSVKG

SEQ ID NO: 148 - protein, 16 aa, synthetic construct
  REGION 1..16: note = Synthetic Sequence
AITNQGRLTYADSVKG

SEQ ID NO: 149 - protein, 16 aa, synthetic construct
  REGION 1..16: note = Synthetic Sequence
AITSGGRRAYADSVKG

SEQ ID NO: 150 - protein, 18 aa, synthetic construct
  REGION 1..18: note = Synthetic Sequence
AITSASASRTTYADSVKG

SEQ ID NO: 151 - protein, 17 aa, synthetic construct
  REGION 1..17: note = Synthetic Sequence
CISRSDGSTYYDDSVKG

SEQ ID NO: 152 - protein, 16 aa, synthetic construct
  REGION 1..16: note = Synthetic Sequence
AITNQGRVTYADSVKG

SEQ ID NO: 153 - protein, 16 aa, synthetic construct
  REGION 1..16: note = Synthetic Sequence
AITDGGRLAYADSAKG

SEQ ID NO: 154 - protein, 16 aa, synthetic construct
  REGION 1..16: note = Synthetic Sequence
SITNQGIRNYSTSVMG

SEQ ID NO: 155 - protein, 16 aa, synthetic construct
  REGION 1..16: note = Synthetic Sequence
AITNQGRTTYADSVKG

SEQ ID NO: 156 - protein, 16 aa, synthetic construct
  REGION 1..16: note = Synthetic Sequence
AITNGGRIAYGIAVNG

SEQ ID NO: 157 - protein, 16 aa, synthetic construct
  REGION 1..16: note = Synthetic Sequence
AITNGGRIAYSDSAKG

SEQ ID NO: 158 - protein, 16 aa, synthetic construct
  REGION 1..16: note = Synthetic Sequence
GITSDGSTGYADSVKG

SEQ ID NO: 159 - protein, 17 aa, synthetic construct
  REGION 1..17: note = Synthetic Sequence
AISWSGGSTYYADSVKG

SEQ ID NO: 160 - protein, 16 aa, synthetic construct
  REGION 1..16: note = Synthetic Sequence
AITDQGRLAYADSAKG

SEQ ID NO: 161 - protein, 16 aa, synthetic construct
  REGION 1..16: note = Synthetic Sequence
AITNGGQTTYADSVKG

SEQ ID NO: 162 - protein, 16 aa, synthetic construct
  REGION 1..16: note = Synthetic Sequence
GITSDGSTGYADSVKG

SEQ ID NO: 163 - protein, 16 aa, synthetic construct
  REGION 1..16: note = Synthetic Sequence
AITTGGRTAYVDSVKG

SEQ ID NO: 164 - protein, 16 aa, synthetic construct
  REGION 1..16: note = Synthetic Sequence
AITSQGRITLADSVKG

SEQ ID NO: 165 - protein, 16 aa, synthetic construct
  REGION 1..16: note = Synthetic Sequence
AITVDGRLAYADSAKH

SEQ ID NO: 166 - protein, 16 aa, synthetic construct
  REGION 1..16: note = Synthetic Sequence
AITNGGRIAYGTSVMG

SEQ ID NO: 167 - protein, 16 aa, synthetic construct
  REGION 1..16: note = Synthetic Sequence
AITNGGQIAYADSVKG

SEQ ID NO: 168 - protein, 16 aa, synthetic construct
  REGION 1..16: note = Synthetic Sequence
AITDQGRTTYADSVKG

SEQ ID NO: 169 - protein, 16 aa, synthetic construct
  REGION 1..16: note = Synthetic Sequence
GITTQGRITYGNSVRG

SEQ ID NO: 170 - protein, 16 aa, synthetic construct
  REGION 1..16: note = Synthetic Sequence
AITSGGRTTYVDSVKG

SEQ ID NO: 171 - protein, 17 aa, synthetic construct
  REGION 1..17: note = Synthetic Sequence
AINWRGGDTYYADSVKG

SEQ ID NO: 172 - protein, 16 aa, synthetic construct
  REGION 1..16: note = Synthetic Sequence
AITDGGAKTYADSVKG

SEQ ID NO: 173 - protein, 16 aa, synthetic construct
  REGION 1..16: note = Synthetic Sequence
AITNQGRLSYVDSVKG

SEQ ID NO: 174 - protein, 16 aa, synthetic construct
  REGION 1..16: note = Synthetic Sequence
AITNQGRRTYADSVKG

SEQ ID NO: 175 - protein, 16 aa, synthetic construct
  REGION 1..16: note = Synthetic Sequence
AITNGGRIAYTDSVKG

SEQ ID NO: 176 - protein, 16 aa, synthetic construct
  REGION 1..16: note = Synthetic Sequence
AITNGGRTTYADSVKG

SEQ ID NO: 177 - protein, 16 aa, synthetic construct
  REGION 1..16: note = Synthetic Sequence
AITDGGRLTYADSAKG

SEQ ID NO: 178 - protein, 16 aa, synthetic construct
  REGION 1..16: note = Synthetic Sequence
AITTGGRTTYVDSVKG

SEQ ID NO: 179 - skipped

SEQ ID NO: 180 - protein, 16 aa, synthetic construct
  REGION 1..16: note = Synthetic Sequence
AITNQGRIAYADSVKG

SEQ ID NO: 181 - protein, 16 aa, synthetic construct
  REGION 1..16: note = Synthetic Sequence
GITGSGQITYANSVRG

SEQ ID NO: 182 - protein, 17 aa, synthetic construct
  REGION 1..17: note = Synthetic Sequence
AINWSSGGISYSNSAKG

SEQ ID NO: 183 - protein, 16 aa, synthetic construct
  REGION 1..16: note = Synthetic Sequence
AITGQGRTTYADSVKG

SEQ ID NO: 184 - protein, 16 aa, synthetic construct
  REGION 1..16: note = Synthetic Sequence
AITNGGQIVYADSVKG

SEQ ID NO: 185 - protein, 16 aa, synthetic construct
  REGION 1..16: note = Synthetic Sequence
AITTQGRTTYEDSVKG

SEQ ID NO: 186 - protein, 16 aa, synthetic construct
  REGION 1..16: note = Synthetic Sequence
AITSGGITNYANSVQG

SEQ ID NO: 187 - protein, 16 aa, synthetic construct
  REGION 1..16: note = Synthetic Sequence
AITVGGRLAYADSAKG

SEQ ID NO: 188 - protein, 16 aa, synthetic construct
  REGION 1..16: note = Synthetic Sequence
GITGGGQITYANSVRG

SEQ ID NO: 189 - protein, 16 aa, synthetic construct
  REGION 1..16: note = Synthetic Sequence
AITSQGRSTYADSAKG

SEQ ID NO: 190 - protein, 16 aa, synthetic construct
  REGION 1..16: note = Synthetic Sequence
AITNGGATVYADSVKG

SEQ ID NO: 191 - protein, 16 aa, synthetic construct
  REGION 1..16: note = Synthetic Sequence
AITDGGRLTYADSAKN

SEQ ID NO: 192 - protein, 16 aa, synthetic construct
  REGION 1..16: note = Synthetic Sequence
AITNGGAKTYADSVKG

SEQ ID NO: 193 - protein, 17 aa, synthetic construct
  REGION 1..17: note = Synthetic Sequence
AINWSSGGISYSNAAKG

SEQ ID NO: 194 - protein, 16 aa, synthetic construct
  REGION 1..16: note = Synthetic Sequence
AITNGGATVYADSVKG

SEQ ID NO: 195 - protein, 16 aa, synthetic construct
  REGION 1..16: note = Synthetic Sequence
AITNGGRIAYGTSVMG

SEQ ID NO: 196 - protein, 16 aa, synthetic construct
  REGION 1..16: note = Synthetic Sequence
AITNGGQTAYADSVKG

SEQ ID NO: 197 - protein, 16 aa, synthetic construct
  REGION 1..16: note = Synthetic Sequence
  SITE 5: note = misc_feature - Xaa can be any naturally occurring amino acid
AITNXGRTTYADSVKG

SEQ ID NO: 198 - protein, 17 aa, synthetic construct
  REGION 1..17: note = Synthetic Sequence
AIWWASGGISYANSAKG

SEQ ID NO: 199 - protein, 16 aa, synthetic construct
  REGION 1..16: note = Synthetic Sequence
AITNQGAPTYADSVKG

SEQ ID NO: 200 - protein, 17 aa, synthetic construct
  REGION 1..17: note = Synthetic Sequence
AISWSGGSTYYADSVKG

SEQ ID NO: 201 - protein, 7 aa, synthetic construct
  REGION 1..7: note = Synthetic Sequence
VALSAEY

SEQ ID NO: 202 - protein, 7 aa, synthetic construct
  REGION 1..7: note = Synthetic Sequence
VALKAEY

SEQ ID NO: 203 - protein, 7 aa, synthetic construct
  REGION 1..7: note = Synthetic Sequence
VGLKAEY

SEQ ID NO: 204 - protein, 13 aa, synthetic construct
  REGION 1..13: note = Synthetic Sequence
KTKSAVLFGGMDY

SEQ ID NO: 205 - protein, 7 aa, synthetic construct
  REGION 1..7: note = Synthetic Sequence
YIRGEDY

SEQ ID NO: 206 - protein, 7 aa, synthetic construct
  REGION 1..7: note = Synthetic Sequence
KHYASNY

SEQ ID NO: 207 - protein, 8 aa, synthetic construct
  REGION 1..8: note = Synthetic Sequence
QDFGSPSF

SEQ ID NO: 208 - protein, 8 aa, synthetic construct
  REGION 1..8: note = Synthetic Sequence
QDFRSPDF

SEQ ID NO: 209 - protein, 8 aa, synthetic construct
  REGION 1..8: note = Synthetic Sequence
QIFGSPNF

SEQ ID NO: 210 - protein, 7 aa, synthetic construct
  REGION 1..7: note = Synthetic Sequence
LAIHGDY

SEQ ID NO: 211 - protein, 7 aa, synthetic construct
  REGION 1..7: note = Synthetic Sequence
NQIRQWP

SEQ ID NO: 212 - protein, 7 aa, synthetic construct
  REGION 1..7: note = Synthetic Sequence
NSIRQWP

SEQ ID NO: 213 - protein, 7 aa, synthetic construct
  REGION 1..7: note = Synthetic Sequence
NAIRQWP

SEQ ID NO: 214 - protein, 8 aa, synthetic construct
  REGION 1..8: note = Synthetic Sequence
RKVGGPDY

SEQ ID NO: 215 - protein, 7 aa, synthetic construct
  REGION 1..7: note = Synthetic Sequence
NTFGNVY

SEQ ID NO: 216 - protein, 7 aa, synthetic construct
  REGION 1..7: note = Synthetic Sequence
FTRRDDY

SEQ ID NO: 217 - protein, 7 aa, synthetic construct
  REGION 1..7: note = Synthetic Sequence
FQSSGID

SEQ ID NO: 218 - protein, 8 aa, synthetic construct
  REGION 1..8: note = Synthetic Sequence
WAADYQQY

SEQ ID NO: 219 - protein, 8 aa, synthetic construct
  REGION 1..8: note = Synthetic Sequence
WNRDRQQY

SEQ ID NO: 220 - protein, 13 aa, synthetic construct
  REGION 1..13: note = Synthetic Sequence
KPTPVYGSTVGDY

SEQ ID NO: 221 - protein, 7 aa, synthetic construct
  REGION 1..7: note = Synthetic Sequence
FTRDKDY

SEQ ID NO: 222 - protein, 8 aa, synthetic construct
  REGION 1..8: note = Synthetic Sequence
WDRDRQQY

SEQ ID NO: 223 - protein, 7 aa, synthetic construct
  REGION 1..7: note = Synthetic Sequence
FTRTDDY

SEQ ID NO: 224 - protein, 8 aa, synthetic construct
  REGION 1..8: note = Synthetic Sequence
YDRSSTPY

SEQ ID NO: 225 - protein, 7 aa, synthetic construct
  REGION 1..7: note = Synthetic Sequence
FTRGDDY

SEQ ID NO: 226 - protein, 7 aa, synthetic construct
  REGION 1..7: note = Synthetic Sequence
LNSATTY

SEQ ID NO: 227 - protein, 7 aa, synthetic construct
  REGION 1..7: note = Synthetic Sequence
YTRDEDY

SEQ ID NO: 228 - protein, 7 aa, synthetic construct
  REGION 1..7: note = Synthetic Sequence
FTRDEDY

SEQ ID NO: 229 - protein, 13 aa, synthetic construct
  REGION 1..13: note = Synthetic Sequence
KWYDPLVIEYYDN

SEQ ID NO: 230 - protein, 7 aa, synthetic construct
  REGION 1..7: note = Synthetic Sequence
KADHNDY

SEQ ID NO: 231 - protein, 8 aa, synthetic construct
  REGION 1..8: note = Synthetic Sequence
FRSGADDY

SEQ ID NO: 232 - protein, 15 aa, synthetic construct
  REGION 1..15: note = Synthetic Sequence
EVPSTYSCSGFREDY

SEQ ID NO: 233 - protein, 8 aa, synthetic construct
  REGION 1..8: note = Synthetic Sequence
FAASGMEY

SEQ ID NO: 234 - protein, 8 aa, synthetic construct
  REGION 1..8: note = Synthetic Sequence
WTTDRQQY

SEQ ID NO: 235 - protein, 9 aa, synthetic construct
  REGION 1..9: note = Synthetic Sequence
FAGWGKEDY

SEQ ID NO: 236 - protein, 7 aa, synthetic construct
  REGION 1..7: note = Synthetic Sequence
FSPTGDY

SEQ ID NO: 237 - protein, 13 aa, synthetic construct
  REGION 1..13: note = Synthetic Sequence
KPTPVYGSTVGDY

SEQ ID NO: 238 - protein, 13 aa, synthetic construct
  REGION 1..13: note = Synthetic Sequence
KASPVYGSTVEDY

SEQ ID NO: 239 - protein, 8 aa, synthetic construct
  REGION 1..8: note = Synthetic Sequence
STPRGDSY

SEQ ID NO: 240 - protein, 15 aa, synthetic construct
  REGION 1..15: note = Synthetic Sequence
EAEGSGREGNFYERS

SEQ ID NO: 241 - protein, 8 aa, synthetic construct
  REGION 1..8: note = Synthetic Sequence
WDRDRQQY

SEQ ID NO: 242 - protein, 7 aa, synthetic construct
  REGION 1..7: note = Synthetic Sequence
FTRSDDY

SEQ ID NO: 243 - protein, 8 aa, synthetic construct
  REGION 1..8: note = Synthetic Sequence
STPRGDSY

SEQ ID NO: 244 - protein, 7 aa, synthetic construct
  REGION 1..7: note = Synthetic Sequence
FTRDTDY

SEQ ID NO: 245 - protein, 7 aa, synthetic construct
  REGION 1..7: note = Synthetic Sequence
WTTLGTF

SEQ ID NO: 246 - protein, 8 aa, synthetic construct
  REGION 1..8: note = Synthetic Sequence
WVRDGQQY

SEQ ID NO: 247 - protein, 13 aa, synthetic construct
  REGION 1..13: note = Synthetic Sequence
KAIPVYGSTVEDY

SEQ ID NO: 248 - protein, 13 aa, synthetic construct
  REGION 1..13: note = Synthetic Sequence
KAAATHLSTVADY

SEQ ID NO: 249 - protein, 7 aa, synthetic construct
  REGION 1..7: note = Synthetic Sequence
FGRFDDY

SEQ ID NO: 250 - protein, 14 aa, synthetic construct
  REGION 1..14: note = Synthetic Sequence
WGVKTGPESGSGTL

SEQ ID NO: 251 - protein, 7 aa, synthetic construct
  REGION 1..7: note = Synthetic Sequence
FTRDEDY

SEQ ID NO: 252 - protein, 10 aa, synthetic construct
  REGION 1..10: note = Synthetic Sequence
RLTTEYDYAY

SEQ ID NO: 253 - protein, 7 aa, synthetic construct
  REGION 1..7: note = Synthetic Sequence
FTRGNDY

SEQ ID NO: 254 - protein, 7 aa, synthetic construct
  REGION 1..7: note = Synthetic Sequence
FQSSGID

SEQ ID NO: 255 - protein, 7 aa, synthetic construct
  REGION 1..7: note = Synthetic Sequence
FSPTDDF

SEQ ID NO: 256 - protein, 13 aa, synthetic construct
  REGION 1..13: note = Synthetic Sequence
KAIPIYGSTAEDY

SEQ ID NO: 257 - protein, 7 aa, synthetic construct
  REGION 1..7: note = Synthetic Sequence
FSLTDDY

SEQ ID NO: 258 - protein, 8 aa, synthetic construct
  REGION 1..8: note = Synthetic Sequence
WTRDRQQY

SEQ ID NO: 259 - protein, 7 aa, synthetic construct
  REGION 1..7: note = Synthetic Sequence
FTRDEDF

SEQ ID NO: 260 - protein, 14 aa, synthetic construct
  REGION 1..14: note = Synthetic Sequence
EVEGSGREGNFYGA

SEQ ID NO: 261-266 - skipped (6 entries)

SEQ ID NO: 267 - protein, 5 aa, synthetic construct
  REGION 1..5: note = Synthetic Sequence
PGWDY

SEQ ID NO: 268 - protein, 8 aa, synthetic construct
  REGION 1..8: note = Synthetic Sequence
YDRSATAY

SEQ ID NO: 269 - protein, 11 aa, synthetic construct
  REGION 1..11: note = Synthetic Sequence
ASSVLSGTVDY

SEQ ID NO: 270 - protein, 8 aa, synthetic construct
  REGION 1..8: note = Synthetic Sequence
FAADGMEY

SEQ ID NO: 271 - protein, 13 aa, synthetic construct
  REGION 1..13: note = Synthetic Sequence
KAAASYVSTVADY

SEQ ID NO: 272 - protein, 6 aa, synthetic construct
  REGION 1..6: note = Synthetic Sequence
TAKDDY

SEQ ID NO: 273 - protein, 9 aa, synthetic construct
  REGION 1..9: note = Synthetic Sequence
FTGWGKEDY

SEQ ID NO: 274 - protein, 8 aa, synthetic construct
  REGION 1..8: note = Synthetic Sequence
WAADYQQY

SEQ ID NO: 275 - protein, 8 aa, synthetic construct
  REGION 1..8: note = Synthetic Sequence
YDRSATPY

SEQ ID NO: 276 - protein, 8 aa, synthetic construct
  REGION 1..8: note = Synthetic Sequence
WARDRQQY

SEQ ID NO: 277 - protein, 7 aa, synthetic construct
  REGION 1..7: note = Synthetic Sequence
FTRGDDY

SEQ ID NO: 278 - protein, 8 aa, synthetic construct
  REGION 1..8: note = Synthetic Sequence
WTKDRQQY

SEQ ID NO: 279 - protein, 7 aa, synthetic construct
  REGION 1..7: note = Synthetic Sequence
FTRTYDY

SEQ ID NO: 280 - protein, 11 aa, synthetic construct
  REGION 1..11: note = Synthetic Sequence
ASSILSGTVDY

SEQ ID NO: 281 - protein, 8 aa, synthetic construct
  REGION 1..8: note = Synthetic Sequence
WAADYQQY

SEQ ID NO: 282 - protein, 13 aa, synthetic construct
  REGION 1..13: note = Synthetic Sequence
KPAPVYGSTVGDY

SEQ ID NO: 283 - protein, 8 aa, synthetic construct
  REGION 1..8: note = Synthetic Sequence
FAADGMEY

SEQ ID NO: 284 - protein, 6 aa, synthetic construct
  REGION 1..6: note = Synthetic Sequence
FGSGGG

SEQ ID NO: 285 - protein, 11 aa, synthetic construct
  REGION 1..11: note = Synthetic Sequence
ASSVLSGTADY

SEQ ID NO: 286 - protein, 7 aa, synthetic construct
  REGION 1..7: note = Synthetic Sequence
FTRGDDY

SEQ ID NO: 287 - protein, 15 aa, synthetic construct
  REGION 1..15: note = Synthetic Sequence
EAEGSGREGNFYERS

SEQ ID NO: 288 - protein, 115 aa, synthetic construct
  REGION 1..115: note = Synthetic Sequence (R2CHCL8)
QVQLVESGGGLVHPGGSLRLSCAASGSISSINVMGWYRQAPGKERELVARITNLGLPNYADWLKDRFTISRDNAKNTVYLQMNSLKPEDTAVYYCYLVALSAEYWGQGTQVTVSS

SEQ ID NO: 289 - protein, 115 aa, synthetic construct
  REGION 1..115: note = Synthetic Sequence (R1CHCL50)
QVQLVESGGGLVHPGGSLRLSCAASGSFSSINVMGWYRQAPGKERELVARITNLGLPNYADSVTGRFTISRDNAKNTVYLQMNSLKPEDTAVYYCYLVALKAEYWGQGTQVTVSS

SEQ ID NO: 290 - protein, 115 aa, synthetic construct
  REGION 1..115: note = Synthetic Sequence (R1CHCL21)
QVQLVESGGGLVHRGGSLRLSCAASGSISSINIMGWYRQAPGKERELVARITNIGLPNYADSVKGRFTISRDNAKSTVYLQMNSLNAEDTAVYYCYLVALKAEYWGQGTQVTVSS

SEQ ID NO: 291 - protein, 115 aa, synthetic construct
  REGION 1..115: note = Synthetic Sequence (R2CHCL87)
QVQLVESGGGLVQPGGSLRLSCAASGSISSINVMGWYRQAPGKERELVARITNLGLPNYADSVEGRFTISRDKDENTVYLEMNTLKPEDTAVYYCYLVGLKAEYWGQGTQVTVSS

SEQ ID NO: 292 - protein, 121 aa, synthetic construct
  REGION 1..121: note = Synthetic Sequence (R2CHCL24)
QVQLVESGGGLVQPGGSLRLSCAASGSSDSINAMGWYRQAPGKERELVAAITSGGRVVYSDSVKGRGTISRDNAKNTVYLQIASLKPEDTAVYYCNVKTKSAVLFGGMDYWGKGTQVTVSS

SEQ ID NO: 293 - protein, 115 aa, synthetic construct
  REGION 1..115: note = Synthetic Sequence (R2CHCL38)
QVQLVESGGGLVQPGGSLRLSCAASVSIFSINAMGWYRQAPGKERELVAAITSGGRTAYADSVKGRFTISRDNSKNTVYLQMDSLKPEDTDVYYCKAYIRGEDYWGKGTQVTVSS

SEQ ID NO: 294 - protein, 115 aa, synthetic construct
  REGION 1..115: note = Synthetic Sequence (R1CHCL16)
DVQLVESGGGLVQPGGSLRLSCAASGSIFSLNAMGWYRQAPGKERELVAHITSDGRIVYADPVKGRFTISRVDGKNMVTLQMNSLKPEDTAVYYCNAKHYASNYWGQGTQVTVSS

SEQ ID NO: 295 - protein, 117 aa, synthetic construct
  REGION 1..117: note = Synthetic Sequence (R2CHCL10)
QVQLVESGGGSVQAGGSLRLSCAASGRTISNYDMAWSRQAPGKEREFVARISGSGDRTDYADSVKGRFTISRDNAKNTVYLQMNSLKPEDTAIYYCQIQDFGSPSFSGQGTQVTVSS

SEQ ID NO: 296 - protein, 117 aa, synthetic construct
  REGION 1..117: note = Synthetic Sequence (R1CHCL34)
DVQLVESGGGSVQAGGSLRLSCAASGRTISNYDMAWSRQAPGKEREFVARISGSGDRTDYADSVKGRFTISRDNAKNTVYLQMNSLKPEDTAIYYCQIQDFRSPDFWSQGTQVTVSS

SEQ ID NO: 297 - protein, 117 aa, synthetic construct
  REGION 1..117: note = Synthetic Sequence (R1CHCL82)
QVQLVESGGESVQAGGSLRLSCAASGRTISNYDMAWSRQAPGKEREFVARISGSGDRTDYADSVKGRFTISRDNAKNTVYLQMNSLKPEDTAIYNCQTQIFGSPNFSGQGTQVTVSS

SEQ ID NO: 298 - protein, 116 aa, synthetic construct
  REGION 1..116: note = Synthetic Sequence (R2CHCL3)
QVQLVESGGGLVQAGDSLRLSCAASGRTFTTSLMQWHRQAPGKEREFVASITWSTGNTHYADSVKGRFTISRDNARNTVYLQMNSLKPEDTAIYTCRVLAIHGDYWGQGTQVTVSS

SEQ ID NO: 299 - protein, 116 aa, synthetic construct
  REGION 1..116: note = Synthetic Sequence (R2CHCL69)
DVQLVESGGGLVQAGDSLRLSCAASERNLRIYDMAWYRQAPGKEREYVAVISSSGDSTHYSDFVKGRFTISRDNAKNTVSLQMDSLKPEDTAFYYCNVNQIRQWPWGQGTQVTVSS

SEQ ID NO: 300 - protein, 116 aa, synthetic construct
  REGION 1..116: note = Synthetic Sequence (R1CHCL56)
QVQLVESGGGLVQAGDSLRLSCAASERNLRIYDMAWYRQAPGKEREYVAVISSSGDSTHYSDFVKGRFTISRDNAKNTVSLQMDSLKPEDTAFYYCNVNSIRQWPWGQGTQVTVSS

SEQ ID NO: 301 - protein, 116 aa, synthetic construct
  REGION 1..116: note = Synthetic Sequence (R2CHCL32)
QVQLVESGGGLVQAGDSLRLSCTASERNLRSYDMAWWRQAPGKEREYVAVITSSGDSTHYSDFVKGRFTISRDNAKNTVSLQMDSLKPEDTASYYCNVNAIRQWPWGQGTQVTVSS

SEQ ID NO: 302 - protein, 117 aa, synthetic construct
  REGION 1..117: note = Synthetic Sequence (R2CHCL49)
DVQLVESGGGSVQAGGSLRLSCAISGLTFSNYHMGWYRQAPGREREFVAQITWSDASIYYAGSVKGRFTISRDNVKNIVYLQIDNLKPEDTAIYYCDARKVGGPDYWGQGTQVTVSS

SEQ ID NO: 303 - protein, 117 aa, synthetic construct
  REGION 1..117: note = Synthetic Sequence (R2CHCL53)
QVQLVESGGGLVQAGGSLTLSCAISGLTFSSYHMGWYRQAPGREREFVAQITWSDTSIYYAGSVKGRFTISRDNVKNIVYLQIDNLKPEDTAIYYCDARKVGGPDYWGQGTQVTVSS

SEQ ID NO: 304 - protein, 117 aa, synthetic construct
  REGION 1..117: note = Synthetic Sequence (R2CHCL22)
DVQLVESGGGLVQAGGSLRLSCAISGLTFSRYHMGWYRQAPGREREFVAQITWSDGTTYYPGSVKGRFTISRDNARNTVYLQIDNLKPEDTAIYYCDARKVGGPDYWGQGTQVTVSS

SEQ ID NO: 305 - protein, 117 aa, synthetic construct
  REGION 1..117: note = Synthetic Sequence (R2CHCL25)
QVQLVESGGGLVQAGGSLRLSCATSGLTLSSYYIAWYRQAPGREREFVAQIRWSDDSTYYPGSVKGRFTISRDNARNTVYLRMDNLKPEDTARYYCDARKVGGPDYWGQGTQVTVSS

SEQ ID NO: 306 - protein, 117 aa, synthetic construct
  REGION 1..117: note = Synthetic Sequence (R2CHCL18)
DVQLVESGGGLVQAGGSLRLSCATSGLTFSSYYTGWYRQAPGREREFVAQISWSDDSTYYADSVKGRFTISRDNARNTVYLQMNNLKPGDTAIYYCDARKVGGPDYWGQGTQVTVSS

SEQ ID NO: 307 - protein, 117 aa, synthetic construct
  REGION 1..117: note = Synthetic Sequence (R1CHCL23)
DVQLVESGGGLVQAGGSLRLSCATSGLTLSSYHMGWYRQAPGREREFVAQISWSDDSTYYADSVKGRFTISRDNARNTVYLQMNNLKPEDTAIYYCDARKVGGPDYWGQGTQVTVSS

SEQ ID NO: 308 - protein, 115 aa, synthetic construct
  REGION 1..115: note = Synthetic Sequence (R1CHCL27)
DVQLVESGGGLVQAGGSLRLSCAASGRTSSPYVTGWYRQTPGKEREPVATVSWGGVTYYADSVKGRFTISRDNAKNTVYLQMNALKPEDTAIYYCNVNTFGNVYWGQGTQVTVSS

SEQ ID NO: 309 - protein, 112 aa, synthetic construct
  REGION 1..112: note = Synthetic Sequence (R2CHCL13)
QVQLVESGGGLVQPGGSLRLSCAASGFTFSGYVMSWVRQAPGKGLEWVASIGSGGGYPSYTDSVEGRFTISRDNAKNTLYLLMDNLKPDDTAVYYCEMLGRRGQGTQVTVSS

SEQ ID NO: 310 - protein, 112 aa, synthetic construct
  REGION 1..112: note = Synthetic Sequence (R2CHCL14)
QVQLVESGGGLVQPGGSLRLSCAASGFTFSGYVMSWVRQAPGKGLEWVASIGSGGGYPSYTDSVEGRFTISRDNAKNTLYLQMNNLKPDDTAVYYCEMLGRRGQGTQVTVSS

SEQ ID NO: 311 - protein, 112 aa, synthetic construct
  REGION 1..112: note = Synthetic Sequence (R2CHCL42)
QVQLVESGGGLVQPGGSLRLSCAASGFTFSGYVMSWVRQAPGKGLEWVASIGSGGGYPSYTGSVEGRFTISRDNAKNTLYLLMNNLKPDDTAVYYCEMLGRRGQGTQVTVSS

SEQ ID NO: 312 - protein, 112 aa, synthetic construct
  REGION 1..112: note = Synthetic Sequence (R2CHCL41)
QVQLVESGGGLVQPGGSLRLSCAASGFTFSGYVMSWVRQAPGKGLEWVAHIGSGGGYPSYTDSVQGRFTISRDNAKNTLYLQMNNLKPEDTAVYYCEMLGRRGQGTQVTVSS

SEQ ID NO: 313 - protein, 112 aa, synthetic construct
  REGION 1..112: note = Synthetic Sequence (R2CHCL94)
QVQLVESGGGLVQPGGSLRLSCAASGFTFSGYVMTWVRQAPGKGLEWVAHIGSGGGHATYTDSVEGRFTISRDNAKNTLYLQMNNLKAEDTAVYYCEFLGRRGQGTQVTVSS

SEQ ID NO: 314 - protein, 112 aa, synthetic construct
  REGION 1..112: note = Synthetic Sequence (R2CHCL27)
QVQLVESGGGLVQPGGSLRLSCAASGFTFSGYLMSWVRQAPGKGLEWVATIGSGGGITSYADSVKGRFTISRDNAKNTLYLQMNNLKHEDTAVYYCETVIKRGQGTQVTVSS

SEQ ID NO: 315 - protein, 134 aa, synthetic construct
  REGION 1..134: note = Synthetic Sequence (1LEC 7)
QVQLQESGGGLVQPGGSLRLSCAASGRISSINSMGWYRQAPGNQRELVAAITNGGAKTYADSVKGRFTISTDNAGNTVYLQMDSLRPEDTAVYYCKAFTRRDDYWGQGTQITVSSAAAYPYDVPDYGSHHHHHH

SEQ ID NO: 316 - protein, 134 aa, synthetic construct
  REGION 1..134: note = Synthetic Sequence (1LEC 9)
QVQLQESGGGLVQAGGSLRLSCAASGSITSINAMGWYRQAPGKQRELVAAITSGGRLSYADSVKGRFTISRDNAESTVALQMNSLKPEDTAVYSCAAFQSSGIDWGQGTQVTVSSAAAYPYDVPDYGSHHHHHH

SEQ ID NO: 317 - protein, 135 aa, synthetic construct
  REGION 1..135: note = Synthetic Sequence (1LEC 26)
QVQLQESGGGLVQPGGSLRLSCAASGRFFRVNAMGWYRQAPGKQRELVAAITNGGQTAYADSVKGRFTISKESARNTVHLQMSSLKPEDTAVYYCTIWAADYQQYWGQGTQVTVSSAAAYPYDVPDYGSHHHHHH

SEQ ID NO: 318 - protein, 135 aa, synthetic construct
  REGION 1..135: note = Synthetic Sequence (1LEC 27)
QVQLQESGGGLVQAGESLRLSCAASGSSDSINAMGWYRQAPGKQRELVAAITSGGRSTYIDSAKGRATISRDNARNTAYLQMSSLKAEDTAVYYCTIWNRDRQQYWGQGTQVTVSSAAAYPYDVPDYGSHHHHHH

SEQ ID NO: 319 - protein, 140 aa, synthetic construct
  REGION 1..140: note = Synthetic Sequence (1LEC 28)
QVQLQESGGGLVQSGGSLRLSCAASGSVFSINAWGWYRQAPGKQRELVAAITNQGRIAYAPSVNGRFTISRDSAKNTVYLQMNSLKPEDTAVYYCNAKPTPVYGSTVGDYWGQGTQVTVSSAAAYPYDVPDYGSHHHHHH

SEQ ID NO: 320 - protein, 134 aa, synthetic construct
  REGION 1..134: note = Synthetic Sequence (1LEC 30)
QVQLQESGGGLVQAGGSLRLSCAASGSILSINSMGWYRPALGNQRELVAAITNDGRTTYVDSVKGRFTISRDNAKNTVYLQMNSLKPEDTAVYWCKAFTRDKDYWGQGTQVTVSSAAAYPYDVPDYGSHHHHHH

SEQ ID NO: 321-332 - skipped (12 entries)

SEQ ID NO: 333 - protein, 135 aa, synthetic construct
  REGION 1..135: note = Synthetic Sequence (1LEC 38)
  SITE 108: note = misc_feature - Xaa can be any naturally occurring amino acid
QVQLQESGGGLVQTGGSLRLSCAASVSISSINSMGWYRQAPGKERELVAAVTVGGRYAYADSAKNRFTISRDDAQNTVHLQMSSLRAEDTAVYYCTIWDRDRQQYWGXGTQVTVSSAAAYPYDVPDYGSHHHHHH

SEQ ID NO: 334 - protein, 134 aa, synthetic construct
  REGION 1..134: note = Synthetic Sequence (1LEC 42)
QVQLQESGGGLVQPGGSLRLSCAASGRVFSINAMGWYRQAPGKQRELVAAITNQGATTYADSVKGRFTISRDTAGNTVYLQMNSLRPEDTAVHYCKAFTRTDDYWGQGTQVTVSSAAAYPYDVPDYGSHHHHHH

SEQ ID NO: 335 - protein, 135 aa, synthetic construct
  REGION 1..135: note = Synthetic Sequence (1LEC 51)
QVQLQESGGGLVQAGGSLRLSCAASVNIDTLNSMAWYRQAPGKQRELVAGITGSGQITYANSVRGRFTVSRDNAKSTVYLQMNTLQPEDTAVYYCAAYDRSSTPYWGQGTQVTVSSAAAYPYDVPDYGSHHHHHH

SEQ ID NO: 336 - protein, 134 aa, synthetic construct
  REGION 1..134: note = Synthetic Sequence (1LEC 61)
QVQLQESGGGLVQPGGSLRLSCAASGGISSINSMGWYRQAPGNQRELVAAITNGGRTVYGDSVKGRFTISRDSAGNTVHLQMDSLRPEDTGVYYCKAFTRGDDYWGQGTQVTVSSAAAYPYDVPDYGSHHHHHH

SEQ ID NO: 337 - protein, 134 aa, synthetic construct
  REGION 1..134: note = Synthetic Sequence (1LEC 62)
QVQLQESGGGLVQPGGFLSLSCAASGSMHSVNSMAWYRQVPGKQRELVAAITSGGRLAYAPSVNGRFTISRDYAKNTIHLQMNSLEPEDTAVYYCAALNSATTYWGQGTQVTVSSAAAYPYDVPDYGSHHHHHH

SEQ ID NO: 338 - protein, 134 aa, synthetic construct
  REGION 1..134: note = Synthetic Sequence (1LEC 63)
QVQLQESGGGLVQAGGSLRLSCAATGDISSINAMGWHRPARGNERELVAAITNGGRTTYVDSVKGRFTISRDNAKNTVYLQMNSLKPEDTAVYFCKAYTRDEDYWGQGTQVTVSSAAAYPYDVPDYGSHHHHHH

SEQ ID NO: 339 - protein, 134 aa, synthetic construct
  REGION 1..134: note = Synthetic Sequence (1LEC 64)
QVQLQESGGGLVRAGGSLRLSCAASGSIFSIDAMGWYRPAHGEQRELVAAITTGGRTTYVDSVKGRFTISRDNAKNTVYLQMNSLKPEDTAVYFCKAFTRDEDYWGQGTQVTVSSAAAYPYDVPDYGSHHHHHH

SEQ ID NO: 340 - protein, 140 aa, synthetic construct
  REGION 1..140: note = Synthetic Sequence (1LEC 70)
QVQLQESGGGLVQPGGSLRLSCAASGSIFSINAMGWYRQAPGKQRELVAAITNQGRLTYADSVKGRFTISRDNAKNTVFLQMDSLKPEDTAVYYCNAKWYDPLVIEYYDNWGQGTQVTVSSAAAYPYDVPDYGSHHHHHH

SEQ ID NO: 341 - protein, 134 aa, synthetic construct
  REGION 1..134: note = Synthetic Sequence (1LEC 84)
QVQLQESGGGLVQPGGSLRLSCAASGSIFSIAAMGWYRQAPGKQRELVAAITSGGRRAYADSVKGRFTISRDNDENTVALQMNSLKPEDTDVYYCNAKADHNDYWGQGTQITVSSAAAYPYDVPDYGSHHHHHH

SEQ ID NO: 342 - protein, 137 aa, synthetic construct
  REGION 1..137: note = Synthetic Sequence (1LEC 88)
QVQLQESGGGLVQPGGSLRLSCAAIGNIASITAMGWYRQAPGKQRELVAAITSASASRTTYADSVKGRFTISRDNAKNTVYLQMNSLQPEDTAVYYCKGFRSGADDYWGQGTQVTVSSAAAYPYDVPDYGSHHHHHH

SEQ ID NO: 343 - protein, 143 aa, synthetic construct
  REGION 1..143: note = Synthetic Sequence (1LEC 91)
QVQLQESGGGLVQPGGSLRLSCAASGFTFDDYAIGWFRQAPGKEHEGVSCISRSDGSTYYDDSVKGRFTISSDNAKNTVYLQMNSLKPEDTAVYYCAAEVPSTYSCSGFREDYKGKGTQVTVSSAAAYPYDVPDYGSHHHHHH

SEQ ID NO: 344 - protein, 135 aa, synthetic construct
  REGION 1..135: note = Synthetic Sequence (1LEC 92)
QVQLQESGGGLVQPGGSLRLSCAASGSISSINAMGWYRQAPGNQRELVAAITNQGRVTYADSVKGRFTISRDGAKNTVYLQMNSLKPEDTAVYYCKVFAASGMEYWGKGTQVTVSSAAAYPYDVPDYGSHHHHHH

SEQ ID NO: 345 - protein, 135 aa, synthetic construct
  REGION 1..135: note = Synthetic Sequence (1LEC 94)
QVQLQESGGGLVQAGESLRLSCAASVSIFRSYFMGWYRQAPGKQRELVAAITDGGRLAYADSAKGRFTISREDTRNTVHLQMSSLKAEDTAVYYCTIWTTDRQQYWGQGTQVTVSSAAAYPYDVPDYGSHHHHHH

SEQ ID NO: 346 - protein, 136 aa, synthetic construct
  REGION 1..136: note = Synthetic Sequence (2LEC 6)
QVQLQESGGGWVQPGGSLRLSCAATGSIVSINAIGWYRQAPGKQRELVASITNQGIRNYSTSVMGRFTISRDDVKNTVSLQMNSLKPEDSAVYYCKGFAGWGKEDYWGQGTQVTVSSAAAYPYDVPDYGSHHHHHH

SEQ ID NO: 347 - protein, 134 aa, synthetic construct
  REGION 1..134: note = Synthetic Sequence (2LEC 13)
QVQLQESGGGLVQAGASLRLSCAASGSIFSINAMGWYRQAPGKQRELVAAITNQGRTTYADSVKGRFTISRDNAKNTVYLQMDSLEPEDTAIYYCKGFSPTGDYWGQGTQVTVSSAAAYPYDVPDYGSHHHHHH

SEQ ID NO: 348 - protein, 140 aa, synthetic construct
  REGION 1..140: note = Synthetic Sequence (2LEC 16)
QVQLQESGGGLVQPGGSLRLSCLASRSFSSFNAMGWYRQAPGKERELVAAITNGGRIAYGIAVNGRFTISRDNAKNTVYLQMNSLKPEDTAVYYCNAKPTPVYGSTVGDYWGQGTQVTVSSAAAYPYDVPDYGSHHHHHH

SEQ ID NO: 349 - protein, 140 aa, synthetic construct
  REGION 1..140: note = Synthetic Sequence (2LEC 20)
QVQLQESGGGLVQAGGSLTLSCAASGSFSSINAMGYYRQAPGKQRELVAAITNGGRIAYSDSAKGRFTISRDSAKNTMYLQMNSLKPEDTDVYYCNAKASPVYGSTVEDYWGQGTQVTVSSAAAYPYDVPDYGSHHHHHH

SEQ ID NO: 350 - protein, 135 aa, synthetic construct
  REGION 1..135: note = Synthetic Sequence (2LEC 23)
QVQLQESGGGLVQPGGSLRLSCAASGTSFSINGMAWYRQAPGGQRELVGGITSDGSTGYADSVKGRFTVSRDNAKNTVYLQMNRLKPEDTAVYYCGTSTPRGDSYWGQGTQVTVSSAAAYPYDVPDYGSHHHHHH

SEQ ID NO: 351 - protein, 145 aa, synthetic construct
  REGION 1..145: note = Synthetic Sequence (2LEC 24)
QVQLQESGGGLVQAGGSLRLSCAASGRTFSTYAMGWFRQAPGKERGLVAAISWSGGSTYYADSVKGRFTIFRDNAENTVYLQMNSLKPEDTAVYYCAAEAEGSGREGNFYERSWYQGQGTQVTVSSAAAYPYDVPDYGSHHHHHH

SEQ ID NO: 352 - protein, 135 aa, synthetic construct
  REGION 1..135: note = Synthetic Sequence (2LEC 26)
QVQLQESGGGLVETGGSLRLSCAASGSIFSINAMGWYRQAPGKQRELVAAITDQGRLAYADSAKGRFTISRENARNTLHLQMSSLKAEDTAVYYCTIWDRDRQQYWGQGTQVTVSSAAAYPYDVPDYGSHHHHHH

SEQ ID NO: 353 - protein, 134 aa, synthetic construct
  REGION 1..134: note = Synthetic Sequence (2LEC 38)
QVQLQESGGGLVQPGGSLRLSCAASGRIFDINAMGWYRQAPGKQRELVAAITNGGQTTYADSVKGRFTISRDNAGNTVYLQMNSLRPEDTAVYYCKAFTRSDDYWGQGTQVTVSSAAAYPYDVPDYGSHHHHHH

SEQ ID NO: 354 - protein, 135 aa, synthetic construct
  REGION 1..135: note = Synthetic Sequence (2LEC 48)
QVQLQESGGGLVQAGGSLRLSCAASGTLFSINGMAWYRQAPGKRRELVGGITSDGSTGYADSVKGRFTISRDNAKNTAYLQMNSLKPEDTAVYYCGTSTPRGDSYWGQGTQVTVSSAAAYPYDVPDYGSHHHHHH

SEQ ID NO: 355 - protein, 134 aa, synthetic construct
  REGION 1..134: note = Synthetic Sequence (2LEC 53)
QVQLQESGGGLVQAGGSLRLSCAASGSIDSINAMGWYRPALGEQRELVAAITTGGRTAYVDSVKGRFTISRDAAKNTVYLQMNSLKPEDTAVYSCKAFTRDTDYWGQGTQVTVSSAAAYPYDVPDYGSHHHHHH

SEQ ID NO: 356 - protein, 134 aa, synthetic construct
  REGION 1..134: note = Synthetic Sequence (2LEC 54)
QVQLQESGGGLAQPGGSLQLSCAASGRAFSTNSMGWYRQASGKQRELVAAITSQGRITLADSVKGRFTISSDNTKNTVFLQMNSLKPEDTAVYYCNAWTTLGTFGGQGTQVTVSSAAAYPYDVPDYGSHHHHHH

SEQ ID NO: 357 - protein, 136 aa, synthetic construct
  REGION 1..136: note = Synthetic Sequence (2LEC 55)
QVQLQESGGGLVQTGESLSLSCAVASGSIISINSMGWYRQAPEKQRELVAAITVDGRLAYADSAKHRFTISKESARNTVHLHMSSLKPEDTAVYYCTIWVRDGQQYWGQGTQVTVSSAAAYPYDVPDYGSHHHHHH

SEQ ID NO: 358 - protein, 140 aa, synthetic construct
  REGION 1..140: note = Synthetic Sequence (2LEC 59)
QVQLQESGGGLVQPGGSLRLSCAVSRNFFSINAMGWYRQAPGKQRELVAAITNGGRIAYGTSVMGRFTISRDDAKNTVDLQMNSLRPEDTAVYYCNAKAIPVYGSTVEDYWGQGTQVTVSSAAAYPYDVPDYGSHHHHHH

SEQ ID NO: 359 - protein, 140 aa, synthetic construct
  REGION 1..140: note = Synthetic Sequence (2LEC 60)
QVQLQESGGGLVQPGGSLRLSCAASGRFFRVNAMGWYRQVPGKQRELVAAITNGGQIAYADSVKGRFTISRDSAKNTVYLQMNSLKSEDTDVYYCNAKAAATHLSTVADYWGQGTQVTVSSAAAYPYDVPDYGSHHHHHH

SEQ ID NO: 360 - protein, 136 aa, synthetic construct
  REGION 1..136: note = Synthetic Sequence (2LEC 61)
QVQLQESGGGLVQPGGSLRLSCAASGSIVSINSMGWYRQAPGKQRELVAAITDQGRTTYADSVKGRFTISRDDAKNKNTVYLQMNSLKAEDTAVYACKAFGRFDDYWGQGTQVTVSSAAAYPYDVPDYGSHHHHHH

SEQ ID NO: 361 - protein, 141 aa, synthetic construct
  REGION 1..141: note = Synthetic Sequence (2LEC 62)
QVQLQESGGGLVQPGGSLRLSCAAYGSIFSINAMGWYRQAPGKERELVAGITTQGRITYGNSVRGRFTISGDNAKNTVYLQMKSLKPEDTAVYYCSAWGVKTGPESGSGTLEGQGTQVTVSSAAAYPYDVPDYGSHHHHHH

SEQ ID NO: 362 - protein, 134 aa, synthetic construct
  REGION 1..134: note = Synthetic Sequence (2LEC 63)
QVQLQESGGGLVQAGGSLRLSCAASGSIIGINSMGYYRTAPGKQRELVAAITSGGRTTYVDSVKGRFTISRDNAKNTVYLQMNSLKPEDTAVYFCKAFTRDEDYWGQGTQVTVSSAAAYPYDVPDYGSHHHHHH

SEQ ID NO: 363 - protein, 138 aa, synthetic construct
  REGION 1..138: note = Synthetic Sequence (2LEC 67)
QVQLQESGGGLVQAGGSLRLSCAASGRTFPGYVMAWFRQSPGQEREFAAAINWRGGDTYYADSVKGRFTISRDNVKNTVFLQMNSLKPEDTAVYFCAARLTTEYDYAYWGQGTQVTVSSAAAYPYDVPDYGSHHHHHH

SEQ ID NO: 364 - protein, 134 aa, synthetic construct
  REGION 1..134: note = Synthetic Sequence (2LEC 68)
QVQLQESGGGLVQPGESLRLSCAASGSIFSINAMGWYRQAPGKQRELVAAITDGGAKTYADSVKGRFTISTDNAGNTVYLQMDSLRPEDTAVYYCKAFTRGNDYWGQGTQVTVSSAAAYPYDVPDYGSHHHHHH

SEQ ID NO: 365 - protein, 134 aa, synthetic construct
  REGION 1..134: note = Synthetic Sequence (2LEC 76)
QVQLQESGGGLVQAGESLRLSCVVSGRTFSINAMGWYRQAPGKQRELVAAITNQGRLSYVDSVKGRFTISRDNAANTVYLQMNSLKPEDTAVYYCAAFQSSGIDWGQGTQVTVSSAAAYPYDVPDYGSHHHHHH

SEQ ID NO: 366 - protein, 134 aa, synthetic construct
  REGION 1..134: note = Synthetic Sequence (2LEC 83)
QVQLQESGGGLVQAGGSLRLSCAASGRTLSSYTIGWYRQAPGKQRELVAAITNQGRRTYADSVKGRFTISRDNAKNTVYLQMDSLKSEDTAVYYCKGFSPTDDFWGQGTQVTVSSAAAYPYDVPDYGSHHHHHH

SEQ ID NO: 367 - protein, 140 aa, synthetic construct
  REGION 1..140: note = Synthetic Sequence (2LEC 88)
QVQLQESGGGLVQPGGSLRLSCTASGSFFSINAMGWYRQAPGNQRELVAAITNGGRIAYTDSVKGRFTISNDNAKNTVYLQMNSLKPEDTDVYYCNAKAIPIYGSTAEDYWGQGTQVTVSSAAAYPYDVPDYGSHHHHHH

SEQ ID NO: 368 - protein, 134 aa, synthetic construct
  REGION 1..134: note = Synthetic Sequence (2LEC 89)
QVQLQESGGGLVQAGGSLRLSCAASGSIFSINSMGWYRQAPGKQRELVAAITNGGRTTYADSVKGRFTISRDNAKNTVYLQMDSLKPEDTAVYYCKGFSLTDDYWGQGTQVTVSSAAAYPYDVPDYGSHHHHHH

SEQ ID NO: 369 - protein, 135 aa, synthetic construct
  REGION 1..135: note = Synthetic Sequence (2LEC 90)
QVQLQESGGGLVQTGGSLRLSCAASGSIFSFNAMGWYRQAPGKQRELVAAITDGGRLTYADSAKGRFTISRENTRNTVHLQMSSLKAEDTADYYCTIWTRDRQQYWGQGTQVTVSSAAAYPYDVPDYGSHHHHHH

SEQ ID NO: 370 - protein, 134 aa, synthetic construct
  REGION 1..134: note = Synthetic Sequence (2LEC 93)
QVQLQESGGGLVQAGGSLRLSCAASGSIFSINAMGWYRPALGEQRELVAAITTGGRTTYVDSVKGRFSISRDNAKNTVYLQMNSLKPEDTAVYFCKAFTRDEDFWGQGTQVTVSSAAAYPYDVPDYGSHHHHHH

SEQ ID NO: 371 - protein, 145 aa, synthetic construct
  REGION 1..145: note = Synthetic Sequence (2LEC 95)
QVQLQESGGGLVQAGGSLRLSCEASGRTFSTYAMAWFRQAPGKERDLVAAISWSGGSTEYHDSVKGRFTISRDNTKNTVYLQMNSLKAEDTAVYYCAAEVEGSGREGNFYGASWYPGQGTQVTVSSAAAYPYDVPDYGSHHHHHH

SEQ ID NO: 372 - protein, 132 aa, synthetic construct
  REGION 1..132: note = Synthetic Sequence (3LEC 4)
QVQLQESGGGLVQPGGSLRLSCAASGSFFSINAMGWYRQAPGKQRELVAAITNQGRIAYADSVKGRFTISRDNAKNTVYLQMNSLKPEDTAVYYCGRPGWDYWGQGTQVTVSSAAAYPYDVPDYGSHHHHHH

SEQ ID NO: 373 - protein, 135 aa, synthetic construct
  REGION 1..135: note = Synthetic Sequence (3LEC 6)
QVQLQESGGGLVQAGGSLRLSCVASVNIGSLNSMVWYRQSPGKQRELVAGITGSGQITYANSVRGRFTVSRDIAKSTAYLQMNTLKPEDTAVYYCAAYDRSATAYWGQGTQVTVSSAAAYPYDVPDYGSHHHHHH

SEQ ID NO: 374 - protein, 139 aa, synthetic construct
  REGION 1..139: note = Synthetic Sequence (3LEC 9)
QVQLQESGGGLVQAGGSLRVSCAASGRTLSNYAVGWWRQAPGKQREFVAAINWSSGGISYSNSAKGRFALSRDNAKNTVYLQMDSLKPEDTAVYYCAAASSVLSGTVDYWGQGTQVTVSSAAAYPYDVPDYGSHHHHHH

SEQ ID NO: 375 - protein, 135 aa, synthetic construct
  REGION 1..135: note = Synthetic Sequence (3LEC 11)
QVQLQESGGGLVQPGGSLRLSCAASGSISSINAMGWYRQAPGKQRELVAAITGQGRTTYADSVKGRFTISRDGAKNTVYLQMNSLKPEDTAVYYCKVFAADGMEYWGKGTQVTVSSAAAYPYDVPDYGSHHHHHH

SEQ ID NO: 376 - protein, 140 aa, synthetic construct
  REGION 1..140: note = Synthetic Sequence (3LEC 13)
QVQLQESGGGLVQPGGSLRLSCAASGRFFRVNAMGWYRQAPGKQRELVAAITNGGQIVYADSVKGRFTISRDSAKNTVYLQMNSLKSEDTAVYYCNAKAAASYVSTVADYWGQGTQVTVSSAAAYPYDVPDYGSHHHHHH

SEQ ID NO: 377 - protein, 134 aa, synthetic construct
  REGION 1..134: note = Synthetic Sequence (3LEC 15)
QVQLQESGGGLVQAGGSLRLSCAASGSVFSINAMGWYRQAPEKQRELVAAITTQGRTTYEDSVKGRFTISRDGAQNTVYLQMDSLKPEDTAVYYCKAWTAKDDYWGKGTQVTVSSAAAYPYDVPDYGSHHHHHH

SEQ ID NO: 378 - protein, 136 aa, synthetic construct
  REGION 1..136: note = Synthetic Sequence (3LEC 22)
QVQLQESGGGRVQPGGSLRLSCAAIGSIFEINSIGWYRQAPGKQRELVAAITSGGITNYANSVQGRSTISRDNVNNTVYLQMNSLKPEDSAVYYCKGFTGWGKEDYWGQGTQVTVSSAAAYPYDVPDYGSHHHHHH

SEQ ID NO: 379 - protein, 135 aa, synthetic construct
  REGION 1..135: note = Synthetic Sequence (3LEC 23)
QVQLQESGGGLVQTGGSLRLSCAASGSIFNINSMGWYRQAPGKQRELVAAITVGGRLAYADSAKGRFTISKESARNTVHLQMSSLKPEDTAVYYCTIWAADYQQYWGQGTQVTVSSAAAYPYDVPDYGSHHHHHH

SEQ ID NO: 380 - protein, 135 aa, synthetic construct
  REGION 1..135: note = Synthetic Sequence (3LEC 27)
QVQLQESGGGLVQAGGSLRLSCAASVNIGTLNSMAWYREAPGKQRELVAGITGGGQITYANSVRGRFTVSRDIAKSTAYLQMNTLKPEDTAVYYCAAYDRSATPYWGQGTQVTVSSAAAYPYDVPDYGSHHHHHH

SEQ ID NO: 381 - protein, 135 aa, synthetic construct
  REGION 1..135: note = Synthetic Sequence (3LEC 30)
QVQLQESGGGLVQTGGSLRLSCAASGSIFSINSMGWYRQAPGKQRELVAAITSQGRSTYADSAKGRFTISLGNARNTVNLQMSSLKTEDTAVYYCTIWARDRQQYWGQGTQVTVSSAAAYPYDVPDYGSHHHHHH

SEQ ID NO: 382 - protein, 134 aa, synthetic construct
  REGION 1..134: note = Synthetic Sequence (3LEC 36)
QVQLQESGGGLVQPGGSLRLSCAASGRIGSINSMGWYRQAPGKQREMVAAITNGGATVYADSVKGRFTISRDNAGNTVDLHMNSLRPEDSAVYYCKAFTRGDDYWGQGTQVTVSSAAAYPYDVPDYGSHHHHHH

SEQ ID NO: 383 - protein, 135 aa, synthetic construct
  REGION 1..135: note = Synthetic Sequence (3LEC 55)
QVQLQESGGGLVQPGGSLKLSCAASGSIFSFNAMGWYRQAPGKQRELVAAITDGGRLTYADSAKNRFTISRENTRNTVHLQMSSLKAEDTAVYYCTIWTKDRQQYWGQGTQVTVSSAAAYPYDVPDYGSHHHHHH

SEQ ID NO: 384 - protein, 134 aa, synthetic construct
  REGION 1..134: note = Synthetic Sequence (3LEC 57)
QVQLQESGGGLVQPGGSLRLSCAASGRISSINSMGWYRQAPGKQRELVAAITNGGAKTYADSVKGRFTISRDGAGNTVYLQMDNLRPEDTAVYYCKAFTRTYDYWGQGTQVTVSSAAAYPYDVPDYGSHHHHHH

SEQ ID NO: 385 - protein, 139 aa, synthetic construct
  REGION 1..139: note = Synthetic Sequence (3LEC 61)
QVQLQESGGGLVQAGGSLRVSCAASGRTLSNYAVAWFRQAPGKQREFVAAINWSSGGISYSNAAKGRFALSRDNAKNTVYLQMDSLKPEDTAVYYCAAASSILSGTVDYWGQGTQVTVSSAAAYPYDVPDYGSHHHHHH

SEQ ID NO: 386 - protein, 135 aa, synthetic construct
  REGION 1..135: note = Synthetic Sequence (3LEC 62)
QVQLQESGGGLVQPGGSLRLSCAASGRIGSINSMGWYRQAPGKQREMVAAITNGGATVYADSVKGRFTISRDNAGNTVDLHMNSLRPEDSAVYYCTIWAADYQQYWGQGTQVTVSSAAAYPYDVPDYGSHHHHHH

SEQ ID NO: 387 - protein, 140 aa, synthetic construct
  REGION 1..140: note = Synthetic Sequence (3LEC 66)
QVQLQESGGGLVQPGGSLRLSCAASRSFFSFNAMGWYRQAPGKQRELVAAITNGGRIAYGTSVMGRFTISRDNAKNTVYLQMDSLKPEDTAVYYCNAKPAPVYGSTVGDYWGQGTQVTVSSAAAYPYDVPDYGSHHHHHH

SEQ ID NO: 388 - protein, 135 aa, synthetic construct
  REGION 1..135: note = Synthetic Sequence (3LEC 69)
QVQLQESGGGLVQPGGSPRLSCAASGRFFRVNAMGWYRQAPGKQRELVAAITNGGQTAYADSVKGRFTISRDSAKNTVYLQMNSLKSEDTAVYYCKVFAADGMEYWGKGTQVTVSSAAAYPYDVPDYGSHHHHHH

SEQ ID NO: 389 - protein, 133 aa, synthetic construct
  REGION 1..133: note = Synthetic Sequence (3LEC 76)
  SITE 54: note = misc_feature - Xaa can be any naturally occurring amino acid
QVQLQESGGGLVQPGESLRLSCAASGIIFSINAMGWYRQAPGKQRELVAAITNXGRTTYADSVKGRFTISRDNAKNTVTLQMNSLKPEDTAVYYCNAFGSGGGVGQGTQVTVSSAAAYPYDVPDYGSHHHHHH

SEQ ID NO: 390 - protein, 139 aa, synthetic construct
  REGION 1..139: note = Synthetic Sequence (3LEC 82)
QVQLQESGGGLVQAGGSLRLSCAASGRTLSNYAVAWFRQAPGKQRELVAAIWWASGGISYANSAKGRFVLSRDNAKNTVYLQMDSLKPEDTAVYYCAAASSVLSGTADYWGQGTQVTVSSAAAYPYDVPDYGSHHHHHH

SEQ ID NO: 391 - protein, 134 aa, synthetic construct
  REGION 1..134: note = Synthetic Sequence (3LEC 89)
QVQLQESGGGLVQPGGSLRLSCAASGRIFSVNAMGWYRQAPGKQRELVAAITNQGAPTYADSVKGRFTISRDNAGNTVYLQMNSLRPEDTAVYYCKAFTRGDDYWGQGTQVTVSSAAAYPYDVPDYGSHHHHHH

SEQ ID NO: 392 - protein, 145 aa, synthetic construct
  REGION 1..145: note = Synthetic Sequence (3LEC 94)
QVQLQESGGGSVQAGGSLRLSCAASGRTFSSYAMAWFRQAPGMERELVAAISWSGGSTYYADSVKGRFTISRDNAENTVYLQMNSLKPEDTAVYYCAAEAEGSGREGNFYERSWYQGQGTQVTVSSAAAYPYDVPDYGSHHHHHH

SEQ ID NO: 393 - protein, 6 aa, synthetic construct
  REGION 1..6: note = Synthetic Sequence
HHHHHH

SEQ ID NO: 394 - protein, 10 aa, synthetic construct
  REGION 1..10: note = Synthetic Sequence
YPYDVPDYGS

SEQ ID NO: 395 - protein, 19 aa, synthetic construct
  REGION 1..19: note = Synthetic Sequence
AAAYPYDVPDYGSHHHHHH

SEQ ID NO: 396 - protein, 235 aa, Homo sapiens
MALPVTALLLPLALLLHAARPSQFRVSPLDRTWNLGETVELKCQVLLSNPTSGCSWLFQPRGAAASPTFLLYLSQNKPKAAEGLDTQRFSGKRLGDTFVLTLSDFRRENEGYYFCSALSNSIMYFSHFVPVFLPAKPTTTPAPRPPTPAPTIASQPLSLRPEACRPAAGGAVHTRGLDFACDIYIWAPLAGTCGVLLLSLVITLYCNHRNRRRVCKCPRPVVKSGDKPSLSARYV

SEQ ID NO: 397 - protein, 198 aa, Homo sapiens
MALPVTALLLPLALLLHAARPSQFRVSPLDRTWNLGETVELKCQVLLSNPTSGCSWLFQPRGAAASPTFLLYLSQNKPKAAEGLDTQRFSGKRLGDTFVLTLSDFRRENEGYYFCSALSNSIMYFSHFVPVFLPAKPTTTPAPRPPTPAPTIASQPLSLRPEACRPAAGGAGNRRRVCKCPRPVVKSGDKPSLSARYV

SEQ ID NO: 398 - protein, 276 aa, Homo sapiens
MRNQAPGRPKGATFPPRRPTGSRAPPLAPELRAKQRPGERVMALPVTALLLPLALLLHAARPSQFRVSPLDRTWNLGETVELKCQVLLSNPTSGCSWLFQPRGAAASPTFLLYLSQNKPKAAEGLDTQRFSGKRLGDTFVLTLSDFRRENEGYYFCSALSNSIMYFSHFVPVFLPAKPTTTPAPRPPTPAPTIASQPLSLRPEACRPAAGGAVHTRGLDFACDIYIWAPLAGTCGVLLLSLVITLYCNHRNRRRVCKCPRPVVKSGDKPSLSARYV

SEQ ID NO: 399 - protein, 210 aa, Homo sapiens
MRPRLWLLLAAQLTVLHGNSVLQQTPAYIKVQTNKMVMLSCEAKISLSNMRIYWLRQRQAPSSDSHHEFLALWDSAKGTIHGEEVEQEKIAVFRDASRFILNLTSVKPEDSGIYFCMIVGSPELTFGKGTQLSVVDFLPTTAQPTKKSTLKKRVCRLPRPETQKGPLCSPITLGLLVAGVLVLLVSLGVAIHLCCRRRRARLRFMKQFYK

SEQ ID NO: 400 - protein, 221 aa, Homo sapiens
MRPRLWLLLAAQLTVLHGNSVLQQTPAYIKVQTNKMVMLSCEAKISLSNMRIYWLRQRQAPSSDSHHEFLALWDSAKGTIHGEEVEQEKIAVFRDASRFILNLTSVKPEDSGIYFCMIVGSPELTFGKGTQLSVVDFLPTTAQPTKKSTLKKRVCRLPRPETQKGPLCSPITLGLLVAGVLVLLVSLGVAIHLCCRRRRARLRFMKQLRLHPLEKCSRMDY

SEQ ID NO: 401 - protein, 213 aa, Homo sapiens
MRPRLWLLLAAQLTVLHGNSVLQQTPAYIKVQTNKMVMLSCEAKISLSNMRIYWLRQRQAPSSDSHHEFLALWDSAKGTIHGEEVEQEKIAVFRDASRFILNLTSVKPEDSGIYFCMIVGSPELTFGKGTQLSVVDFLPTTAQPTKKSTLKKRVCRLPRPETQKGRRRRARLRFMKQPQGEGISGTFVPQCLHGYYSNTTTSQKLLNPWILKT

SEQ ID NO: 402 - protein, 246 aa, Homo sapiens
MRPRLWLLLAAQLTVLHGNSVLQQTPAYIKVQTNKMVMLSCEAKISLSNMRIYWLRQRQAPSSDSHHEFLALWDSAKGTIHGEEVEQEKIAVFRDASRFILNLTSVKPEDSGIYFCMIVGSPELTFGKGTQLSVVDFLPTTAQPTKKSTLKKRVCRLPRPETQKGPLCSPITLGLLVAGVLVLLVSLGVAIHLCCRRRRARLRFMKQKFNIVCLKISGFTTCCCFQILQISREYGFGVLLQKDIGQ

SEQ ID NO: 403 - protein, 243 aa, Homo sapiens
MRPRLWLLLAAQLTVLHGNSVLQQTPAYIKVQTNKMVMLSCEAKISLSNMRIYWLRQRQAPSSDSHHEFLALWDSAKGTIHGEEVEQEKIAVFRDASRFILNLTSVKPEDSGIYFCMIVGSPELTFGKGTQLSVVDFLPTTAQPTKKSTLKKRVCRLPRPETQKGPLCSPITLGLLVAGVLVLLVSLGVAIHLCCRRRRARLRFMKQPQGEGISGTFVPQCLHGYYSNTTTSQKLLNPWILKT

SEQ ID NO: 404 - protein, 180 aa, Homo sapiens
MRPRLWLLLAAQLTVLHGNSVLQQTPAYIKVQTNKMVMLSCEAKISLSNMRIYWLRQRQAPSSDSHHEFLALWDSAKGTIHGEEVEQEKIAVFRDASRFILNLTSVKPEDSGIYFCMIVGSPELTFGKGTQLSVVDFLPTTAQPTKKSTLKKRVCRLPRPETQKGRRRRARLRFMKQFYK

SEQ ID NO: 405 - protein, 206 aa, Homo sapiens
MRPRLWLLLAAQLTVLHGNSVLQQTPAYIKVQTNKMVMLSCEAKISLSNMRIYWLRQRQAPSSDSHHEFLALWDSAKGTIHGEEVEQEKIAVFRDASRFILNLTSVKPEDSGIYFCMIVGSPELTFGKGTQLSVVDFLPTTAQPTKKSTLKKRVCRLPRPETQKDFTNKQRIGFWCPATKRHRSVMSTMWKNERRDTFNPGEFNGC

SEQ ID NO: 406 - protein, 198 aa, Homo sapiens
MRPRLWLLLAAQLTVLHGNSVLQQTPAYIKVQTNKMVMLSCEAKISLSNMRIYWLRQRQAPSSDSHHEFLALWDSAKGTIHGEEVEQEKIAVFRDASRFILNLTSVKPEDSGIYFCMIVGSPELTFGKGTQLSVVDFLPTTAQPTKKSTLKKRVCRLPRPETQKGLKGKVYQEPLSPNACMDTTAILQPHRSCLTHGS

SEQ ID NO: 407 - protein, 10 aa, synthetic construct
  REGION 1..10: note = Synthetic Sequence
GFTFDDYAMS

SEQ ID NO: 408 - protein, 10 aa, synthetic construct
  REGION 1..10: note = Synthetic Sequence
GFTFDDYAIG

SEQ ID NO: 409 - protein, 10 aa, synthetic construct
  REGION 1..10: note = Synthetic Sequence
GRSFSSYTLA

SEQ ID NO: 410 - protein, 10 aa, synthetic construct
  REGION 1..10: note = Synthetic Sequence
GRTFSSYTMG

SEQ ID NO: 411 - protein, 10 aa, synthetic construct
  REGION 1..10: note = Synthetic Sequence
GRTFSSYIMG

SEQ ID NO: 412 - protein, 10 aa, synthetic construct
  REGION 1..10: note = Synthetic Sequence
GRTFSSYTMG

SEQ ID NO: 413 - protein, 14 aa, synthetic construct
  REGION 1..14: note = Synthetic Sequence
GRTSGRTFSSYTMG

SEQ ID NO: 414 - protein, 10 aa, synthetic construct
  REGION 1..10: note = Synthetic Sequence
GRTFSSYAMG

SEQ ID NO: 415 - protein, 10 aa, synthetic construct
  REGION 1..10: note = Synthetic Sequence
GLTFSNYIMG

SEQ ID NO: 416 - protein, 10 aa, synthetic construct
  REGION 1..10: note = Synthetic Sequence
GRTFSSYTMG

SEQ ID NO: 417 - protein, 10 aa, synthetic construct
  REGION 1..10: note = Synthetic Sequence
GRTFSSDTMG

SEQ ID NO: 418 - protein, 10 aa, synthetic construct
  REGION 1..10: note = Synthetic Sequence
GLTFSNYIMG

SEQ ID NO: 419 - protein, 10 aa, synthetic construct
  REGION 1..10: note = Synthetic Sequence
GFTLDYYGIG

SEQ ID NO: 420 - protein, 10 aa, synthetic construct
  REGION 1..10: note = Synthetic Sequence
GHTFSSYTMG

SEQ ID NO: 421 - protein, 10 aa, synthetic construct
  REGION 1..10: note = Synthetic Sequence
GRTFSSYVIG

SEQ ID NO: 422 - protein, 10 aa, synthetic construct
  REGION 1..10: note = Synthetic Sequence
GFAFDGYAIG

SEQ ID NO: 423 - protein, 10 aa, synthetic construct
  REGION 1..10: note = Synthetic Sequence
GFAFGFFDMT

SEQ ID NO: 424 - protein, 10 aa, synthetic construct
  REGION 1..10: note = Synthetic Sequence
GRTFSNYVIG

SEQ ID NO: 425 - protein, 10 aa, synthetic construct
  REGION 1..10: note = Synthetic Sequence
GSIFSINVMG

SEQ ID NO: 426 - protein, 10 aa, synthetic construct
  REGION 1..10: note = Synthetic Sequence
GRTFSNYNVG

SEQ ID NO: 427 - protein, 10 aa, synthetic construct
  REGION 1..10: note = Synthetic Sequence
GHTFSSYTMG

SEQ ID NO: 428 - protein, 10 aa, synthetic construct
  REGION 1..10: note = Synthetic Sequence
GRTFSTYPVG

SEQ ID NO: 429 - protein, 10 aa, synthetic construct
  REGION 1..10: note = Synthetic Sequence
GRTFSNYAMG

SEQ ID NO: 430 - protein, 10 aa, synthetic construct
  REGION 1..10: note = Synthetic Sequence
GRTFSDYRMG

SEQ ID NO: 431 - protein, 10 aa, synthetic construct
  REGION 1..10: note = Synthetic Sequence
GLTFSNYIMA

SEQ ID NO: 432 - protein, 10 aa, synthetic construct
  REGION 1..10: note = Synthetic Sequence
GRTFSNSVMG

SEQ ID NO: 433 - protein, 10 aa, synthetic construct
  REGION 1..10: note = Synthetic Sequence
GRTFSSYIIG

SEQ ID NO: 434 - protein, 10 aa, synthetic construct
  REGION 1..10: note = Synthetic Sequence
GRTFSSYVMG

SEQ ID NO: 435 - protein, 10 aa, synthetic construct
  REGION 1..10: note = Synthetic Sequence
GGTFSNYVMG

SEQ ID NO: 436 - protein, 10 aa, synthetic construct
  REGION 1..10: note = Synthetic Sequence
GRTFSNYGIG

SEQ ID NO: 437 - protein, 10 aa, synthetic construct
  REGION 1..10: note = Synthetic Sequence
GFTFDDYAIA

SEQ ID NO: 438 - protein, 10 aa, synthetic construct
  REGION 1..10: note = Synthetic Sequence
GRTFSSYTVA

SEQ ID NO: 439 - protein, 10 aa, synthetic construct
  REGION 1..10: note = Synthetic Sequence
GFPFDDYAIA

SEQ ID NO: 440 - protein, 10 aa, synthetic construct
  REGION 1..10: note = Synthetic Sequence
GRTFSSYVMG

SEQ ID NO: 441 - protein, 10 aa, synthetic construct
  REGION 1..10: note = Synthetic Sequence
GRTLSSNPMA

SEQ ID NO: 442 - protein, 10 aa, synthetic construct
  REGION 1..10: note = Synthetic Sequence
GFTFDNYAIG

SEQ ID NO: 443 - protein, 10 aa, synthetic construct
  REGION 1..10: note = Synthetic Sequence
GRAFSSYFMG

SEQ ID NO: 444 - protein, 10 aa, synthetic construct
  REGION 1..10: note = Synthetic Sequence
TPTFSSYNMG

SEQ ID NO: 445 - protein, 10 aa, synthetic construct
  REGION 1..10: note = Synthetic Sequence
GFTFDDYAIA

SEQ ID NO: 446 - protein, 10 aa, synthetic construct
  REGION 1..10: note = Synthetic Sequence
GGTFSGYIMG

SEQ ID NO: 447 - protein, 10 aa, synthetic construct
  REGION 1..10: note = Synthetic Sequence
GRSFSSYTIA

SEQ ID NO: 448 - protein, 10 aa, synthetic construct
  REGION 1..10: note = Synthetic Sequence
GFSSDDYTIG

SEQ ID NO: 449 - protein, 10 aa, synthetic construct
  REGION 1..10: note = Synthetic Sequence
GFTFDDYTIG

SEQ ID NO: 450 - protein, 10 aa, synthetic construct
  REGION 1..10: note = Synthetic Sequence
GFSSDDYTIG

SEQ ID NO: 451 - protein, 10 aa, synthetic construct
  REGION 1..10: note = Synthetic Sequence
GFTFDQYTIA

SEQ ID NO: 452 - protein, 10 aa, synthetic construct
  REGION 1..10: note = Synthetic Sequence
GRTFSSYAMA

SEQ ID NO: 453 - protein, 10 aa, synthetic construct
  REGION 1..10: note = Synthetic Sequence
GFAFDGYAIG

SEQ ID NO: 454 - protein, 10 aa, synthetic construct
  REGION 1..10: note = Synthetic Sequence
GFSSDDYTIA

SEQ ID NO: 455 - protein, 10 aa, synthetic construct
  REGION 1..10: note = Synthetic Sequence
GFSSDDYTIG

SEQ ID NO: 456 - protein, 10 aa, synthetic construct
  REGION 1..10: note = Synthetic Sequence
GFTFDDYTIG

SEQ ID NO: 457 - protein, 10 aa, synthetic construct
  REGION 1..10: note = Synthetic Sequence
GFSSDDYTIG

SEQ ID NO: 458 - protein, 10 aa, synthetic construct
  REGION 1..10: note = Synthetic Sequence
GFSSDDYTIG

SEQ ID NO: 459 - protein, 10 aa, synthetic construct
  REGION 1..10: note = Synthetic Sequence
GFSFDDYAIA

SEQ ID NO: 460 - protein, 10 aa, synthetic construct
  REGION 1..10: note = Synthetic Sequence
GFSSDDYTIG

SEQ ID NO: 461 - protein, 10 aa, synthetic construct
  REGION 1..10: note = Synthetic Sequence
GFTGNDLAIG

SEQ ID NO: 462 - protein, 10 aa, synthetic construct
  REGION 1..10: note = Synthetic Sequence
GFSSDDYTIA

SEQ ID NO: 463 - protein, 10 aa, synthetic construct
  REGION 1..10: note = Synthetic Sequence
EGTLSSYGIG

SEQ ID NO: 464 - protein, 10 aa, synthetic construct
  REGION 1..10: note = Synthetic Sequence
GFSSDDYTIA

SEQ ID NO: 465 - protein, 10 aa, synthetic construct
  REGION 1..10: note = Synthetic Sequence
GFTFDDYAIA

SEQ ID NO: 466 - protein, 10 aa, synthetic construct
  REGION 1..10: note = Synthetic Sequence
GLSSDDYTIG

SEQ ID NO: 467 - protein, 10 aa, synthetic construct
  REGION 1..10: note = Synthetic Sequence
GLSSDDYTIG

SEQ ID NO: 468 - protein, 10 aa, synthetic construct
  REGION 1..10: note = Synthetic Sequence
GFSSDDYTIG

SEQ ID NO: 469 - protein, 10 aa, synthetic construct
  REGION 1..10: note = Synthetic Sequence
GFSFDDYTIG

SEQ ID NO: 470 - protein, 10 aa, synthetic construct
  REGION 1..10: note = Synthetic Sequence
GFTFDDYAIA

SEQ ID NO: 471 - protein, 10 aa, synthetic construct
  REGION 1..10: note = Synthetic Sequence
GFTFDDYAIG

SEQ ID NO: 472 - protein, 10 aa, synthetic construct
  REGION 1..10: note = Synthetic Sequence
GFTFGDYTIG

SEQ ID NO: 473 - protein, 10 aa, synthetic construct
  REGION 1..10: note = Synthetic Sequence
EGTFSSYGIG

SEQ ID NO: 474 - protein, 10 aa, synthetic construct
  REGION 1..10: note = Synthetic Sequence
GFSSDDYTIG

SEQ ID NO: 475 - protein, 10 aa, synthetic construct
  REGION 1..10: note = Synthetic Sequence
GVSIGDYNIG

SEQ ID NO: 476 - protein, 10 aa, synthetic construct
  REGION 1..10: note = Synthetic Sequence
GFTFDDYTIA

SEQ ID NO: 477 - protein, 10 aa, synthetic construct
  REGION 1..10: note = Synthetic Sequence
GFTFDDYTIA

SEQ ID NO: 478 - protein, 17 aa, synthetic construct
  REGION 1..17: note = Synthetic Sequence
TINWNGGSAEYAEPVKG

SEQ ID NO: 479 - protein, 17 aa, synthetic construct
  REGION 1..17: note = Synthetic Sequence
CIRVSDGSTYYADPVKG

SEQ ID NO: 480 - protein, 11 aa, synthetic construct
  REGION 1..11: note = Synthetic Sequence
ASITWGGGNTY

SEQ ID NO: 481 - protein, 11 aa, synthetic construct
  REGION 1..11: note = Synthetic Sequence
AATVWTGAGTV

SEQ ID NO: 482 - protein, 11 aa, synthetic construct
  REGION 1..11: note = Synthetic Sequence
AAIGWSADITV

SEQ ID NO: 483 - protein, 11 aa, synthetic construct
  REGION 1..11: note = Synthetic Sequence
AFIDWSGGGTY

SEQ ID NO: 484 - protein, 11 aa, synthetic construct
  REGION 1..11: note = Synthetic Sequence
ATITWGGGSTY

SEQ ID NO: 485 - protein, 11 aa, synthetic construct
  REGION 1..11: note = Synthetic Sequence
AAISWSGGPTV

SEQ ID NO: 486 - protein, 11 aa, synthetic construct
  REGION 1..11: note = Synthetic Sequence
AAITWGGGSTV

SEQ ID NO: 487 - protein, 11 aa, synthetic construct
  REGION 1..11: note = Synthetic Sequence
AAITWSGVSTV

SEQ ID NO: 488 - protein, 11 aa, synthetic construct
  REGION 1..11: note = Synthetic Sequence
GAIMWSGAFTH

SEQ ID NO: 489 - protein, 11 aa, synthetic construct
  REGION 1..11: note = Synthetic Sequence
AAITWGGGSTV

SEQ ID NO: 490 - protein, 11 aa, synthetic construct
  REGION 1..11: note = Synthetic Sequence
SCISSSDRNTY

SEQ ID NO: 491 - protein, 11 aa, synthetic construct
  REGION 1..11: note = Synthetic Sequence
AFIDWSGGGTY

SEQ ID NO: 492 - protein, 11 aa, synthetic construct
  REGION 1..11: note = Synthetic Sequence
AVITWSGDSTY

SEQ ID NO: 493 - protein, 11 aa, synthetic construct
  REGION 1..11: note = Synthetic Sequence
ACISSKDGSTY

SEQ ID NO: 494 - protein, 11 aa, synthetic construct
  REGION 1..11: note = Synthetic Sequence
SGINSIGGSTT

SEQ ID NO: 495 - protein, 11 aa, synthetic construct
  REGION 1..11: note = Synthetic Sequence
AVVTWSGDSTY

SEQ ID NO: 496 - protein, 10 aa, synthetic construct
  REGION 1..10: note = Synthetic Sequence
AKITNFGITS

SEQ ID NO: 497 - protein, 11 aa, synthetic construct
  REGION 1..11: note = Synthetic Sequence
SFISWISDITY

SEQ ID NO: 498 - protein, 11 aa, synthetic construct
  REGION 1..11: note = Synthetic Sequence
AFIDWSGGGTY

SEQ ID NO: 499 - protein, 11 aa, synthetic construct
  REGION 1..11: note = Synthetic Sequence
AVILWSGVSTY

SEQ ID NO: 500 - protein, 11 aa, synthetic construct
  REGION 1..11: note = Synthetic Sequence
AAIVWSGGSTY

SEQ ID NO: 501 - protein, 11 aa, synthetic construct
  REGION 1..11: note = Synthetic Sequence
AAISSSGYHTY

SEQ ID NO: 502 - protein, 11 aa, synthetic construct
  REGION 1..11: note = Synthetic Sequence
SCISSPDGSTY

SEQ ID NO: 503 - protein, 11 aa, synthetic construct
  REGION 1..11: note = Synthetic Sequence
AAVLWSGVSTA

SEQ ID NO: 504 - protein, 11 aa, synthetic construct
  REGION 1..11: note = Synthetic Sequence
VAITWDGSATT

SEQ ID NO: 505 - protein, 11 aa, synthetic construct
  REGION 1..11: note = Synthetic Sequence
AAIGWNGGITY

SEQ ID NO: 506 - protein, 11 aa, synthetic construct
  REGION 1..11: note = Synthetic Sequence
GFITWSGASTY

SEQ ID NO: 507 - protein, 11 aa, synthetic construct
  REGION 1..11: note = Synthetic Sequence
AGINWSGESAD

SEQ ID NO: 508 - protein, 11 aa, synthetic construct
  REGION 1..11: note = Synthetic Sequence
SCIERSDGSTY

SEQ ID NO: 509 - protein, 11 aa, synthetic construct
  REGION 1..11: note = Synthetic Sequence
SCISNTDSSTY

SEQ ID NO: 510 - protein, 11 aa, synthetic construct
  REGION 1..11: note = Synthetic Sequence
SCISNTDSSTY

SEQ ID NO: 511 - protein, 11 aa, synthetic construct
  REGION 1..11: note = Synthetic Sequence
AQISWSAGSIY

SEQ ID NO: 512 - protein, 11 aa, synthetic construct
  REGION 1..11: note = Synthetic Sequence
AGMSWNPGPAV

SEQ ID NO: 513 - protein, 11 aa, synthetic construct
  REGION 1..11: note = Synthetic Sequence
SCISRSDGSTY

SEQ ID NO: 514 - protein, 11 aa, synthetic construct
  REGION 1..11: note = Synthetic Sequence
ANIGWTGDMTY

SEQ ID NO: 515 - protein, 11 aa, synthetic construct
  REGION 1..11: note = Synthetic Sequence
AAIIWSGSMTY

SEQ ID NO: 516 - protein, 11 aa, synthetic construct
  REGION 1..11: note = Synthetic Sequence
SCISNTDSSTY

SEQ ID NO: 517 - protein, 11 aa, synthetic construct
  REGION 1..11: note = Synthetic Sequence
AANTWSGGPTY

SEQ ID NO: 518 - protein, 10 aa, synthetic construct
  REGION 1..10: note = Synthetic Sequence
SCISSDGSTG

SEQ ID NO: 519 - protein, 11 aa, synthetic construct
  REGION 1..11: note = Synthetic Sequence
SCYSSSDGSTG

SEQ ID NO: 520 - protein, 10 aa, synthetic construct
  REGION 1..10: note = Synthetic Sequence
SCISSDGSTG

SEQ ID NO: 521 - protein, 11 aa, synthetic construct
  REGION 1..11: note = Synthetic Sequence
GCIKSSDGTTG

SEQ ID NO: 522 - protein, 11 aa, synthetic construct
  REGION 1..11: note = Synthetic Sequence
SCISNTDSSTY

SEQ ID NO: 523 - protein, 11 aa, synthetic construct
  REGION 1..11: note = Synthetic Sequence
AAIAWSAGSTY

SEQ ID NO: 524 - protein, 11 aa, synthetic construct
  REGION 1..11: note = Synthetic Sequence
SCISSKEGSTY

SEQ ID NO: 525 - protein, 11 aa, synthetic construct
  REGION 1..11: note = Synthetic Sequence
SCISSSDGSTG

SEQ ID NO: 526 - protein, 11 aa, synthetic construct
  REGION 1..11: note = Synthetic Sequence
SCYSSRDGTTG

SEQ ID NO: 527 - protein, 10 aa, synthetic construct
  REGION 1..10: note = Synthetic Sequence
SCISSDGSTG

SEQ ID NO: 528 - protein, 11 aa, synthetic construct
  REGION 1..11: note = Synthetic Sequence
SCYSSSDGSTG

SEQ ID NO: 529 - protein, 11 aa, synthetic construct
  REGION 1..11: note = Synthetic Sequence
SCFSSSDGSTG

SEQ ID NO: 530 - protein, 11 aa, synthetic construct
  REGION 1..11: note = Synthetic Sequence
SCISNTDSSTF

SEQ ID NO: 531 - protein, 11 aa, synthetic construct
  REGION 1..11: note = Synthetic Sequence
SCYSSSDGSTG

SEQ ID NO: 532 - protein, 11 aa, synthetic construct
  REGION 1..11: note = Synthetic Sequence
SCISNTDSSTY

SEQ ID NO: 533 - protein, 11 aa, synthetic construct
  REGION 1..11: note = Synthetic Sequence
SCISSSDGSTG

SEQ ID NO: 534 - protein, 11 aa, synthetic construct
  REGION 1..11: note = Synthetic Sequence
GGINWSGDSTD

SEQ ID NO: 535 - protein, 11 aa, synthetic construct
  REGION 1..11: note = Synthetic Sequence
SCFSSSDGSAG

SEQ ID NO: 536 - protein, 11 aa, synthetic construct
  REGION 1..11: note = Synthetic Sequence
SCISNTDSSTY

SEQ ID NO: 537 - protein, 11 aa, synthetic construct
  REGION 1..11: note = Synthetic Sequence
SCFSTRDGNAG

SEQ ID NO: 538 - protein, 11 aa, synthetic construct
  REGION 1..11: note = Synthetic Sequence
SCFSSRDGSTG

SEQ ID NO: 539 - protein, 11 aa, synthetic construct
  REGION 1..11: note = Synthetic Sequence
SCFSSRDGSTG

SEQ ID NO: 540 - protein, 10 aa, synthetic construct
  REGION 1..10: note = Synthetic Sequence
SCISSDGSTG

SEQ ID NO: 541 - protein, 11 aa, synthetic construct
  REGION 1..11: note = Synthetic Sequence
SCISNTDSSTY

SEQ ID NO: 542 - protein, 11 aa, synthetic construct
  REGION 1..11: note = Synthetic Sequence
SCISSPDGSTY

SEQ ID NO: 543 - protein, 11 aa, synthetic construct
  REGION 1..11: note = Synthetic Sequence
SCYSSSDGNTG

SEQ ID NO: 544 - protein, 11 aa, synthetic construct
  REGION 1..11: note = Synthetic Sequence
GGINWSGDSTD

SEQ ID NO: 545 - protein, 11 aa, synthetic construct
  REGION 1..11: note = Synthetic Sequence
SCFSSSDGSTG

SEQ ID NO: 546 - protein, 11 aa, synthetic construct
  REGION 1..11: note = Synthetic Sequence
SCISSGDGTTY

SEQ ID NO: 547 - protein, 10 aa, synthetic construct
  REGION 1..10: note = Synthetic Sequence
SCISSDGSTG

SEQ ID NO: 548 - protein, 10 aa, synthetic construct
  REGION 1..10: note = Synthetic Sequence
SCISSDGSTG

SEQ ID NO: 549 - protein, 11 aa, synthetic construct
  REGION 1..11: note = Synthetic Sequence
KDADLVWYNLS

SEQ ID NO: 550 - protein, 11 aa, synthetic construct
  REGION 1..11: note = Synthetic Sequence
KDADLVWYNLR

SEQ ID NO: 551 - protein, 24 aa, synthetic construct
  REGION 1..24: note = Synthetic Sequence
AGSLYTCVQSIVVVPARPYYDMDY

SEQ ID NO: 552 - protein, 19 aa, synthetic construct
  REGION 1..19: note = Synthetic Sequence
AKGLRNSDWDLRRGYEYDY

SEQ ID NO: 553 - protein, 25 aa, synthetic construct
  REGION 1..25: note = Synthetic Sequence
ADQASVPPPYGSERYDIASPSEYDY

SEQ ID NO: 554 - protein, 21 aa, synthetic construct
  REGION 1..21: note = Synthetic Sequence
ANSRAYYSSSYDLGRLASYDY

SEQ ID NO: 555 - protein, 16 aa, synthetic construct
  REGION 1..16: note = Synthetic Sequence
AAQRLGSVTDYTKYDY

SEQ ID NO: 556 - protein, 21 aa, synthetic construct
  REGION 1..21: note = Synthetic Sequence
ASVKVVAGSGIDISGSRNYDY

SEQ ID NO: 557 - protein, 21 aa, synthetic construct
  REGION 1..21: note = Synthetic Sequence
AKRLDYSATDKGVDLSDEYDY

SEQ ID NO: 558 - protein, 19 aa, synthetic construct
  REGION 1..19: note = Synthetic Sequence
AAGGSGRLRDLKVGQNYDY

SEQ ID NO: 559 - protein, 23 aa, synthetic construct
  REGION 1..23: note = Synthetic Sequence
ADSPPRTYSSGSVNLEDGSEYDY

SEQ ID NO: 560 - protein, 21 aa, synthetic construct
  REGION 1..21: note = Synthetic Sequence
VIPGRGSALPIDVGKSDEYEY

SEQ ID NO: 561 - protein, 19 aa, synthetic construct
  REGION 1..19: note = Synthetic Sequence
AAGASGRLRDLKVGQNYDY

SEQ ID NO: 562 - protein, 23 aa, synthetic construct
  REGION 1..23: note = Synthetic Sequence
ADGNVWSPPICGSAGPPPGGMDY

SEQ ID NO: 563 - protein, 16 aa, synthetic construct
  REGION 1..16: note = Synthetic Sequence
AAQRLGSVTDYTKYDY

SEQ ID NO: 564 - protein, 22 aa, synthetic construct
  REGION 1..22: note = Synthetic Sequence
AIPPRAYSGGSYSLKDQSKYEY

SEQ ID NO: 565 - protein, 23 aa, synthetic construct
  REGION 1..23: note = Synthetic Sequence
ADGNVWSPPICSSAGPPPGGMDY

SEQ ID NO: 566 - protein, 9 aa, synthetic construct
  REGION 1..9: note = Synthetic Sequence
KSRSSYSNN

SEQ ID NO: 567 - protein, 22 aa, synthetic construct
  REGION 1..22: note = Synthetic Sequence
AMPPRAYTGRSVSLKDQSKYEY

SEQ ID NO: 568 - protein, 13 aa, synthetic construct
  REGION 1..13: note = Synthetic Sequence
LDTTGWGPPPYQY

SEQ ID NO: 569 - protein, 22 aa, synthetic construct
  REGION 1..22: note = Synthetic Sequence
AHPPDPSRGGEWRLQTPSEYDY

SEQ ID NO: 570 - protein, 16 aa, synthetic construct
  REGION 1..16: note = Synthetic Sequence
AAQRLGSVTDYTKYDY

SEQ ID NO: 571 - protein, 24 aa, synthetic construct
  REGION 1..24: note = Synthetic Sequence
VPRSHFTTAQDMGQDMGAPSWYEY

SEQ ID NO: 572 - protein, 22 aa, synthetic construct
  REGION 1..22: note = Synthetic Sequence
AVLIRYYSGGYQGLSDANEYDY

SEQ ID NO: 573 - protein, 17 aa, synthetic construct
  REGION 1..17: note = Synthetic Sequence
VVKYLSGSYSYAGQYNF

SEQ ID NO: 574 - protein, 23 aa, synthetic construct
  REGION 1..23: note = Synthetic Sequence
ADFNVWSPPICGSVGPPPGGMDY

SEQ ID NO: 575 - protein, 21 aa, synthetic construct
  REGION 1..21: note = Synthetic Sequence
AHESTYYSGTYYLTDPRRYVY

SEQ ID NO: 576 - protein, 19 aa, synthetic construct
  REGION 1..19: note = Synthetic Sequence
AVPARGLTMDLENSDIYDH

SEQ ID NO: 577 - protein, 22 aa, synthetic construct
  REGION 1..22: note = Synthetic Sequence
AATLQVTGSYYLDLSTVDIYDN

SEQ ID NO: 578 - protein, 20 aa, synthetic construct
  REGION 1..20: note = Synthetic Sequence
ATLFRSNGPKDLSSGYEYDY

SEQ ID NO: 579 - protein, 13 aa, synthetic construct
  REGION 1..13: note = Synthetic Sequence
AGESGVWVGGLDY

SEQ ID NO: 580 - protein, 22 aa, synthetic construct
  REGION 1..22: note = Synthetic Sequence
VGSANSGEFRFGWVLKPDLYNY

SEQ ID NO: 581 - protein, 23 aa, synthetic construct
  REGION 1..23: note = Synthetic Sequence
ADGNVWSPPICGSAGPPPGGMDY

SEQ ID NO: 582 - protein, 23 aa, synthetic construct
  REGION 1..23: note = Synthetic Sequence
ADGNVWSPPICGSAGPPPGGMDY

SEQ ID NO: 583 - protein, 20 aa, synthetic construct
  REGION 1..20: note = Synthetic Sequence
ERGYAYCSDDGCQRTQDYDY

SEQ ID NO: 584 - protein, 21 aa, synthetic construct
  REGION 1..21: note = Synthetic Sequence
GAARAWWSGSYDYTRMNNYDY

SEQ ID NO: 585 - protein, 23 aa, synthetic construct
  REGION 1..23: note = Synthetic Sequence
AETSADSGEFRFGWVLKPSLYDY

SEQ ID NO: 586 - protein, 21 aa, synthetic construct
  REGION 1..21: note = Synthetic Sequence
AAGSAYSGSYWNITMAANYDY

SEQ ID NO: 587 - protein, 18 aa, synthetic construct
  REGION 1..18: note = Synthetic Sequence
AQRIFGAQPMDLSGDYEY

SEQ ID NO: 588 - protein, 23 aa, synthetic construct
  REGION 1..23: note = Synthetic Sequence
ADGNVWSPPICGSAGPPPGGMDY

SEQ ID NO: 589 - protein, 18 aa, synthetic construct
  REGION 1..18: note = Synthetic Sequence
ARDYRGIKDLDLKGDYDY

SEQ ID NO: 590 - protein, 25 aa, synthetic construct
  REGION 1..25: note = Synthetic Sequence
ADFNVWSPPICGSIWYGPPPRGMDY

SEQ ID NO: 591 - protein, 25 aa, synthetic construct
  REGION 1..25: note = Synthetic Sequence
ADSNVWSPPICGSRWYGPPPGGMAY

SEQ ID NO: 592 - protein, 25 aa, synthetic construct
  REGION 1..25: note = Synthetic Sequence
ADFNVWSPPICGSNWYGPPPGGMDY

SEQ ID NO: 593 - protein, 25 aa, synthetic construct
  REGION 1..25: note = Synthetic Sequence
ADFNVWSPPICGSIWYGPPPGGMDY

SEQ ID NO: 594 - protein, 23 aa, synthetic construct
  REGION 1..23: note = Synthetic Sequence
ADGNVWSPPICGSAGPPPGGMDY

SEQ ID NO: 595 - protein, 17 aa, synthetic construct
  REGION 1..17: note = Synthetic Sequence
ARIITVATMRLDSDYDY

SEQ ID NO: 596 - protein, 23 aa, synthetic construct
  REGION 1..23: note = Synthetic Sequence
ADGNVWSPPICGSAGPPPGGMDY

SEQ ID NO: 597 - protein, 25 aa, synthetic construct
  REGION 1..25: note = Synthetic Sequence
ADSNVWSPPICGRTWYGPPPGGMDY

SEQ ID NO: 598 - protein, 25 aa, synthetic construct
  REGION 1..25: note = Synthetic Sequence
ADFNVWSPPICGSIWYGPPPGGMAY

SEQ ID NO: 599 - protein, 25 aa, synthetic construct
  REGION 1..25: note = Synthetic Sequence
ADFNVWSPPICGSNWYGPPPGGMDY

SEQ ID NO: 600 - protein, 25 aa, synthetic construct
  REGION 1..25: note = Synthetic Sequence
ADFNVWSPPICGSSWYGPPPGGMDY

SEQ ID NO: 601 - protein, 25 aa, synthetic construct
  REGION 1..25: note = Synthetic Sequence
ADFNVWSPPICGSRWYGPPPGGMEY

SEQ ID NO: 602 - protein, 23 aa, synthetic construct
  REGION 1..23: note = Synthetic Sequence
ADGNVWSPPICGSAGPPPGGMDY

SEQ ID NO: 603 - protein, 25 aa, synthetic construct
  REGION 1..25: note = Synthetic Sequence
ADFNVWSPPICGSRWYGPPPGGMAY

SEQ ID NO: 604 - protein, 23 aa, synthetic construct
  REGION 1..23: note = Synthetic Sequence
ADGNVWSPPICGSAGPPPGGMDY

SEQ ID NO: 605 - protein, 25 aa, synthetic construct
  REGION 1..25: note = Synthetic Sequence
ADSNVWSPPICGKTWYGPPPGGMDY

SEQ ID NO: 606 - protein, 13 aa, synthetic construct
  REGION 1..13: note = Synthetic Sequence
AGESGVWVGGLDY

SEQ ID NO: 607 - protein, 25 aa, synthetic construct
  REGION 1..25: note = Synthetic Sequence
ADSNVWSPPICGSTWYGPPPGGMAY

SEQ ID NO: 608 - protein, 23 aa, synthetic construct
  REGION 1..23: note = Synthetic Sequence
ADGNVWSPPICGSAGPPPGGMDY

SEQ ID NO: 609 - protein, 25 aa, synthetic construct
  REGION 1..25: note = Synthetic Sequence
ADFNVWSPPICGSRWYGPPPGGMDY

SEQ ID NO: 610 - protein, 25 aa, synthetic construct
  REGION 1..25: note = Synthetic Sequence
ADFNVWSPPICGSRWYGPPPGGMDY

SEQ ID NO: 611 - protein, 25 aa, synthetic construct
  REGION 1..25: note = Synthetic Sequence
ADFNVWSPPICGSRWYGPPPGGMDY

SEQ ID NO: 612 - protein, 25 aa, synthetic construct
  REGION 1..25: note = Synthetic Sequence
ADFNVWSPPICGSIWYGPPPGGMDY

SEQ ID NO: 613 - protein, 23 aa, synthetic construct
  REGION 1..23: note = Synthetic Sequence
ADGNVWSPPICGSAGPPPGGMDY

SEQ ID NO: 614 - protein, 23 aa, synthetic construct
  REGION 1..23: note = Synthetic Sequence
ADFNVWSPPICGSVGPPPGGMDY

SEQ ID NO: 615 - protein, 25 aa, synthetic construct
  REGION 1..25: note = Synthetic Sequence
ADFNVWSPPICGSSWYGPPPGGMAY

SEQ ID NO: 616 - protein, 13 aa, synthetic construct
  REGION 1..13: note = Synthetic Sequence
AGESGVWVGGLDY

SEQ ID NO: 617 - protein, 25 aa, synthetic construct
  REGION 1..25: note = Synthetic Sequence
ADFNVWSPPICGSSWYGPPPGGMEY

SEQ ID NO: 618 - protein, 23 aa, synthetic construct
  REGION 1..23: note = Synthetic Sequence
ADGNVWSPPICGSAGPPPGGMDY

SEQ ID NO: 619 - protein, 25 aa, synthetic construct
  REGION 1..25: note = Synthetic Sequence
ADFNVWSPPICSSNWYGPPPRGMDY

SEQ ID NO: 620 - protein, 25 aa, synthetic construct
  REGION 1..25: note = Synthetic Sequence
ADFNVWSPPICGSIWYGPPPRGMDY

SEQ ID NO: 621 - protein, 132 aa, synthetic construct
  REGION 1..132: note = Synthetic Sequence
QVQLQESGGGSVQPGGSLRLSCAASGFTFDDYAMSWVRQVPGKGLEWVSTINWNGGSAEYAEPVKGRFTISRDNAKNTVYLQMNSLKLEDTAVYYCAKDADLVWYNLSTGQGTQVTVSSAAAYPYDVPDYGS

SEQ ID NO: 622 - protein, 132 aa, synthetic construct
  REGION 1..132: note = Synthetic Sequence
QVQLQESGGGLVQPGGSLRLSCAASGFTFDDYAMSWVRQVPGKGLEWVSTINWNGGSAEYAEPVKGRFTISRDNAKNTVYLQMNSLKLEDTAVYYCAKDADLVWYNLRTGQGTQVTVSSAAAYPYDVPDYGS

SEQ ID NO: 623 - protein, 145 aa, synthetic construct
  REGION 1..145: note = Synthetic Sequence
QVQLQESGGGLVQAGGSLRLSCAASGFTFDDYAIGWFRQAPGKEREGVSCIRVSDGSTYYADPVKGRFTISSDNAKNTVYLQMNSLKPEDAAVYYCAAGSLYTCVQSIVVVPARPYYDMDYWGKGTQVTVSSAAAYPYDVPDYGS

SEQ ID NO: 624 - protein, 146 aa, synthetic construct
  REGION 1..146: note = Synthetic Sequence
QVQLQESGGGLVQAGGSLRLSCAASGRSFSSYTLAWFRQAPGKEREFVASITWGGGNTYYPDSVKGRFTISRDDAKNTVYLQMNSLKPEDTAVYYCAAKGLRNSDWDLRRGYEYDYWGQGTQVTVSSAAAYPYDVPDYGSHHHHHH

SEQ ID NO: 625 - protein, 152 aa, synthetic construct
  REGION 1..152: note = Synthetic Sequence
QVQLQESGGGLVQDGGSLRLSCAFSGRTFSSYTMGWFRQGPGKEREFVAATVWTGAGTVYADSVKGRFTISRDNAKNTVYLQMNSLRPEDTAVYYCAADQASVPPPYGSERYDIASPSEYDYWGQGTQVTVSSAAAYPYDVPDYGSHHHHHH

SEQ ID NO: 626 - protein, 148 aa, synthetic construct
  REGION 1..148: note = Synthetic Sequence
QVQLQESGGGLVQAGASLRLSCAASGRTFSSYIMGWFRQAPGKEREFVAAIGWSADITVYADSVKGRFTISRDNAENMVYLQMNSLNPEDTAVYYCAANSRAYYSSSYDLGRLASYDYWGQGTQVTVSSAAAYPYDVPDYGSHHHHHH

SEQ ID NO: 627 - protein, 143 aa, synthetic construct
  REGION 1..143: note = Synthetic Sequence
QVQLQESGGGLVQAGGSLRLSCAASGRTFSSYTMGWFRQAPGKEREFVAFIDWSGGGTYYDDSVKGRFTISRDNAENTVYLQMNNLEPEDTAVYYCAAAQRLGSVTDYTKYDYWGQGTQVTVSSAAAYPYDVPDYGSHHHHHH

SEQ ID NO: 628 - protein, 152 aa, synthetic construct
  REGION 1..152: note = Synthetic Sequence
QVQLQESGGGLVQAGGSLRLSCAASGRTSGRTFSSYTMGWFRQAPGKEREFVATITWGGGSTYYADSVKGRFTISRDNANNTVYLQMNSLKPEDTAVYYCAASVKVVAGSGIDISGSRNYDYWGQGTQVTVSSAAAYPYDVPDYGSHHHHHH

SEQ ID NO: 629 - protein, 148 aa, synthetic construct
  REGION 1..148: note = Synthetic Sequence
QVQLQESGGGLVQPGGSLRLSCLASGRTFSSYAMGWFRQAPGKEREFVAAISWSGGPTVYADHVKGRFTISRDNAKNTVYLQVNSLKPEDTADYYCAAKRLDYSATDKGVDLSDEYDYWGQGTQVTVSSAAAYPYDVPDYGSHHHHHH

SEQ ID NO: 630 - protein, 146 aa, synthetic construct
  REGION 1..146: note = Synthetic Sequence
QVQLQESGGGLVQAGDSLRLSCAASGLTFSNYIMGWFRQAPGKEREFVAAITWGGGSTVYADSVEGRFTISRDGTKNTVSLQMNSLLPEDTAVYYCAAAGGSGRLRDLKVGQNYDYWGQGTQVTVSSAAAYPYDVPDYGSHHHHHH

SEQ ID NO: 631 - protein, 150 aa, synthetic construct
  REGION 1..150: note = Synthetic Sequence
QVQLQESGGGLVQAGGSLRLSCAASGRTFSSYTMGWFRQAPGREREFVAAITWSGVSTVYTDSVKGRFTVSRDNAKNTVYLQMNSLKPEDTAVYYCAADSPPRTYSSGSVNLEDGSEYDYWGQGTQVTVSSAAAYPYDVPDYGSHHHHHH

SEQ ID NO: 632 - protein, 148 aa, synthetic construct
  REGION 1..148: note = Synthetic Sequence
QVQLQESGGGLVQAGGSLRLSCAASGRTFSSDTMGWFRQAPGKEREFVGAIMWSGAFTHYADSVKGRFTISRDNAKNTVYLQMNALKPEDTAVYYCAVIPGRGSALPIDVGKSDEYEYWGQGTQVTVSSAAAYPYDVPDYGSHHHHHH

SEQ ID NO: 633 - protein, 146 aa, synthetic construct
  REGION 1..146: note = Synthetic Sequence
QVQLQESGGGLVQAGDSLRLSCAASGLTFSNYIMGWFRQAPGKEREFVAAITWGGGSTVYADSVEGRFTISRDGTKNTVSLQMNSLQPEDTAVYYCAAAGASGRLRDLKVGQNYDYWGQGTQVTVSSAAAYPYDVPDYGSHHHHHH

SEQ ID NO: 634 - protein, 150 aa, synthetic construct
  REGION 1..150: note = Synthetic Sequence
QVQLQESGGGLVQAGGSLRLSCAGSGFTLDYYGIGWFRQAPGKEREGVSCISSSDRNTYYADSVKGRFTISGDNAKNTVYLQMNNLKPEDTAVYYCAADGNVWSPPICGSAGPPPGGMDYWGKGTQVTVSSAAAYPYDVPDYGSHHHHHH

SEQ ID NO: 635 - protein, 143 aa, synthetic construct
  REGION 1..143: note = Synthetic Sequence
QVQLQESGGGLVQAGGSLRLSCVASGHTFSSYTMGWFRQAPGKEREFVAFIDWSGGGTYYANSVKGRFTISRDNAENTVYLQMNNLKPEDTAVYYCAAAQRLGSVTDYTKYDYWGQGTQVTVSSAAAYPYDVPDYGSHHHHHH

SEQ ID NO: 636 - protein, 149 aa, synthetic construct
  REGION 1..149: note = Synthetic Sequence
QVQLQESGGGLVQAGGSLRLSCAASGRTFSSYVIGWFRQAPGKEREFVAVITWSGDSTYSSDSLKGRFTISRDNAKNTVYLQMNALNPEDTAVYYCAAIPPRAYSGGSYSLKDQSKYEYWGQGTQVTVSSAAAYPYDVPDYGSHHHHHH

SEQ ID NO: 637 - protein, 149 aa, synthetic construct
  REGION 1..149: note = Synthetic Sequence
QVQLQESGGGLVQAEGSLKLSCISGFAFDGYAIGWFRQAPGKEREGVACISSKDGSTYYADSVKGRFTMSVDKTKNTVYLQMSSLKPEDTAVYYCAADGNVWSPPICSSAGPPPGGMDYWGKGTQVTVSSAAAYPYDVPDYGSHHHHHH

SEQ ID NO: 638 - protein, 139 aa, synthetic construct
  REGION 1..139: note = Synthetic Sequence
QVQLQESGGGLVQPGGSLTLSCAASGFAFGFFDMTWVRQAPGKGLEWVSGINSIGGSTTYADSVKGRFTISRDNAKNELYLQMNSLKPDDTAVYYCAKSRSSYSNNWRPPGQGTQVTVSSAAAYPYDVPDYGSHHHHHH

SEQ ID NO: 639 - protein, 149 aa, synthetic construct
  REGION 1..149: note = Synthetic Sequence
QVQLQESGGGLVQARGSLTLSCAASGRTFSNYVIGWFRQAPGEEREFVAVVTWSGDSTYSSDSLKGRFTISRDNAKNTVYLQMNNLNPEDTAVYYCAAMPPRAYTGRSVSLKDQSKYEYWGQGTQVTVSSAAAYPYDVPDYGSHHHHHH

SEQ ID NO: 640 - protein, 139 aa, synthetic construct
  REGION 1..139: note = Synthetic Sequence
QVQLQESGGGLVQPGGSLRLSCAASGSIFSINVMGWYRQTPGKERELVAKITNFGITSYADSAQGRFTISRGNAKNTVYLQMNSLKPEDTAVYYCNLDTTGWGPPPYQYWGQGTQVTVSSAAAYPYDVPDYGSHHHHHH

SEQ ID NO: 641 - protein, 149 aa, synthetic construct
  REGION 1..149: note = Synthetic Sequence
QVQLQESGGGLVQAGASLRLSCAASGRTFSNYNVGWFRQAPGKEREFVSFISWISDITYYSDSVKGRFIISRDNAKNMVYLQMNSLKPEDTAVYYCAAHPPDPSRGGEWRLQTPSEYDYWGQGTQVTVSSAAAYPYDVPDYGSHHHHHH

SEQ ID NO: 642 - protein, 143 aa, synthetic construct
  REGION 1..143: note = Synthetic Sequence
QVQLQESGGGLVQAGGSLRLSCAASGHTFSSYTMGWFRQAPGKEREFVAFIDWSGGGTYYADSVKGRFTISRDNAENTVYLQMNNLKPEDTAVYYCAAAQRLGSVTDYTKYDYWGQGTQVTVSSAAAYPYDVPDYGSHHHHHH

SEQ ID NO: 643 - protein, 151 aa, synthetic construct
  REGION 1..151: note = Synthetic Sequence
QVQLQESGGGLVQAGGSLRLSCAASGRTFSTYPVGWFRQAPGKEREFVAVILWSGVSTYYADSVKGRFTISRDNAQNTVYLQMDSLKPEDTAVYYCAVPRSHFTTAQDMGQDMGAPSWYEYWGQGTQVTVSSAAAYPYDVPDYGSHHHHHH

SEQ ID NO: 644 - protein, 149 aa, synthetic construct
  REGION 1..149: note = Synthetic Sequence
QVQLQESGGGLVQAGGSLRLSCAASGRTFSNYAMGWFRQAPGKEREFVAAIVWSGGSTYYADSVKGRFTISRDNAKNTVYLQMNSLKPEDTAVYYCAAVLIRYYSGGYQGLSDANEYDYWGQGTQVTVSSAAAYPYDVPDYGSHHHHHH

SEQ ID NO: 645 - protein, 144 aa, synthetic construct
  REGION 1..144: note = Synthetic Sequence
QVQLQESGGGLVQAGASLRLSCSASGRTFSDYRMGWFRQAPGKEREWVAAISSSGYHTYYADSVKGRFTISRDNAKNTGYLQMSSLKPEDTAVYYCAVVKYLSGSYSYAGQYNFWGQGTQVTVSSAAAYPYDVPDYGSHHHHHH

SEQ ID NO: 646 - protein, 150 aa, synthetic construct
  REGION 1..150: note = Synthetic Sequence
QVQLQESGGGLVQAGDSLKLSCAASGLTFSNYIMAWFRQAPGKEREGVSCISSPDGSTYYADSVKGRFTISSDNAKNTVYLQMNSLKPEDTAVYYCAADFNVWSPPICGSVGPPPGGMDYWGKGTQVTVSSAAAYPYDVPDYGSHHHHHH

SEQ ID NO: 647 - protein, 148 aa, synthetic construct
  REGION 1..148: note = Synthetic Sequence
QVQLQESGGGLVQAGGSLRLSCAASGRTFSNSVMGWFRQPPGKEREFVAAVLWSGVSTAYADSVKGRFTISRDNAKNTVYLQMNNLKPDDTAVYYCAAHESTYYSGTYYLTDPRRYVYWGQGTQVTVSSAAAYPYDVPDYGSHHHHHH

SEQ ID NO: 648 - protein, 146 aa, synthetic construct
  REGION 1..146: note = Synthetic Sequence
QVQLQESGGGLVQAGGSLRLSCVGDGRTFSSYIIGWFRQAPGNEREFVVAITWDGSATTYADSVKGRFTVSRDSAKNTAYLQMNSLKPEDTAVYYCAAVPARGLTMDLENSDIYDHWGRGTQVTVSSAAAYPYDVPDYGSHHHHHH

SEQ ID NO: 649 - protein, 149 aa, synthetic construct
  REGION 1..149: note = Synthetic Sequence
QVQLQESGGGLVQAGGSLRLSCAASGRTFSSYVMGWFRQALGKEREFVAAIGWNGGITYYADSVKGRFAISRDNAKNTVYLQMNSLKPEDTAVYYCAAATLQVTGSYYLDLSTVDIYDNWGQGTQVTVSSAAAYPYDVPDYGSHHHHHH

SEQ ID NO: 650 - protein, 147 aa, synthetic construct
  REGION 1..147: note = Synthetic Sequence
QVQLQESGGGLVQAGGSLRLSCAASGGTFSNYVMGWFRQAPGKEREFVGFITWSGASTYYADSVKGRFTISRDNAENTVYLQMNSLKPEDTAVYYCAATLFRSNGPKDLSSGYEYDYWGQGTQVTVSSAAAYPYDVPDYGSHHHHHH

SEQ ID NO: 651 - protein, 140 aa, synthetic construct
  REGION 1..140: note = Synthetic Sequence
  SITE 112: note = misc_feature - Xaa can be any naturally occurring amino acid
QVQLQESGGGLVQAGDSLRLTCTASGRTFSNYGIGWFRQAPGKEREFVAGINWSGESADYADSVKGRFTISRDNAKNTVYLQMNSLKPEDTAVYYCAAGESGVWVGGLDYWXQGTQVTVSSAAAYPYDVPDYGSHHHHHH

SEQ ID NO: 652 - protein, 149 aa, synthetic construct
  REGION 1..149: note = Synthetic Sequence
QVQLQESGGGLVQAGGSLRLSCAASGFTFDDYAIAWFRQAPGKEREGVSCIERSDGSTYYADSVKGRFTISSDNAKNTVYLQMNSLKPEDTAVYYCAVGSANSGEFRFGWVLKPDLYNYWGQGTQVTVSSAAAYPYDVPDYGSHHHHHH

SEQ ID NO: 653 - protein, 150 aa, synthetic construct
  REGION 1..150: note = Synthetic Sequence
QVQLQESGGGLVQAGGSLRLSCTASGRTFSSYTVAWFRQSPGKEREGISCISNTDSSTYYADSVKGRFTISSDNAKSTVHLQMSSLKPEDTAVYYCAADGNVWSPPICGSAGPPPGGMDYWGKGTQVTVSSAAAYPYDVPDYGSHHHHHH

SEQ ID NO: 654 - protein, 150 aa, synthetic construct
  REGION 1..150: note = Synthetic Sequence
QVQLQESGGGLVQPGGSLRLSCATFGFPFDDYAIAWFRQAPGKEREGVSCISNTDSSTYYADSVKGRFTISSDNAKNTVHLQMSSLKPEDTAVYYCAADGNVWSPPICGSAGPPPGGMDYWGKGTQVTVSSAAAYPYDVPDYGSHHHHHH

SEQ ID NO: 655 - protein, 147 aa, synthetic construct
  REGION 1..147: note = Synthetic Sequence
QVQLQESGGGLVQAGGSLRLSCAASGRTFSSYVMGWFRQAPGKEREFVAQISWSAGSIYYADSVKGRFTISNDNAKRTVYLQMNSLKPEDTAVYYCAERGYAYCSDDGCQRTQDYDYWGQGTQVTVSSAAAYPYDVPDYGSHHHHHH

SEQ ID NO: 656 - protein, 148 aa, synthetic construct
  REGION 1..148: note = Synthetic Sequence
QVQLQESGGGLVQAGGSLRLSCAASGRTLSSNPMAWFRQAAGKEREFVAGMSWNPGPAVYADSVKGRFTISRDSAENTVYLQMNSLKPEDTAVYYCAGAARAWWSGSYDYTRMNNYDYWGPGTQVTVSSAAAYPYDVPDYGSHHHHHH

SEQ ID NO: 657 - protein, 150 aa, synthetic construct
  REGION 1..150: note = Synthetic Sequence
QVQLQESGGGLVQAGGSLRLSCAVSGFTFDNYAIGWFRQAPGKEREGVSCISRSDGSTYYADSVRGRFTISSDNAKNTVYLQMNSLKPEDTAVYYCAAETSADSGEFRFGWVLKPSLYDYWGQGTQVTVSSAAAYPYDVPDYGSHHHHHH

SEQ ID NO: 658 - protein, 148 aa, synthetic construct
  REGION 1..148: note = Synthetic Sequence
QVQLQESGGGLVQAGGSLRLSCAASGRAFSSYFMGWFRQTPGKEREFVANIGWTGDMTYYADSVKGRFTISRDNAKNTVYLQMNSLKPEDTAVYYCAAAGSAYSGSYWNITMAANYDYWGQGTQVTVSSAAAYPYDVPDYGSHHHHHH

SEQ ID NO: 659 - protein, 145 aa, synthetic construct
  REGION 1..145: note = Synthetic Sequence
QVQLQESGGGLVQAGGSLRLSCAASTPTFSSYNMGWFRQAPGKEREFVAAIIWSGSMTYYADSMKGRFTVSIDNAKNTVYLQMNSLKPEDTAVYYCAAQRIFGAQPMDLSGDYEYWGQGTQVTVSSAAAYPYDVPDYGSHHHHHH

SEQ ID NO: 660 - protein, 150 aa, synthetic construct
  REGION 1..150: note = Synthetic Sequence
QVQLQESGGGLVQAGGSLRLSCATFGFTFDDYAIAWFRQAPGKEREGISCISNTDSSTYYADSVKGRFTISSDSAKNTVHLQMSSLKPEDTAVYYCAADGNVWSPPICGSAGPPPGGMDYWGKGTQVTVSSAAAYPYDVPDYGSHHHHHH

SEQ ID NO: 661 - protein, 145 aa, synthetic construct
  REGION 1..145: note = Synthetic Sequence
QVQLQESGGGLVQAGGSLRLSCKASGGTFSGYIMGWFRQAPGKEREFVAANTWSGGPTYYSDSVKGRFTISRDNAKNTVYLQMNTLKPEDTAVYQCAARDYRGIKDLDLKGDYDYWGQGTQVTVSSAAAYPYDVPDYGSHHHHHH

SEQ ID NO: 662 - protein, 151 aa, synthetic construct
  REGION 1..151: note = Synthetic Sequence
QVQLQESGGGLVQAGDSLKLSCATSGRSFSSYTIAWFRQAPGKEREGISCISSDGSTGYADSVRGRFTISSDNAKNTVYLQMNSLKPEDTAVYYCAADFNVWSPPICGSIWYGPPPRGMDYWGKGTQVTVSSAAAYPYDVPDYGSHHHHHH

SEQ ID NO: 663 - protein, 152 aa, synthetic construct
  REGION 1..152: note = Synthetic Sequence
QVQLQESGGGLVQAGGYLRLSCAASGFSSDDYTIGWFRQAPGKEREGISCYSSSDGSTGFADSVKGRFTISSDNAKNTVYLQMNNLRPEDTAVYYCAADSNVWSPPICGSRWYGPPPGGMAYWGKGTQVTVSSAAAYPYDVPDYGSHHHHHH

SEQ ID NO: 664 - protein, 151 aa, synthetic construct
  REGION 1..151: note = Synthetic Sequence
QVQLQESGGGLAQVGGSLRLSCTASGFTFDDYTIGWFRQAPGKEREGISCISSDGSTGYADSVKGRFTISSDNAKNTVYLQMNSLKPEDTAVYYCAADFNVWSPPICGSNWYGPPPGGMDYWGKGTQVTVSSAAAYPYDVPDYGSHHHHHH

SEQ ID NO: 665 - protein, 152 aa, synthetic construct
  REGION 1..152: note = Synthetic Sequence
QVQLQESGGGLVQAGGSLRLSCAASGFSSDDYTIGWFRQAPGKEREGIGCIKSSDGTTGYADSVKGRFTISSDNAKNTVYLQMNSLKPEDTAVYYCAADFNVWSPPICGSIWYGPPPGGMDYWGKGTQVTVSSAAAYPYDVPDYGSHHHHHH

SEQ ID NO: 666 - protein, 150 aa, synthetic construct
  REGION 1..150: note = Synthetic Sequence
QVQLQESGGGLAQAGGSLRLSCAASGFTFDQYTIAWFRQAPGKEREGVSCISNTDSSTYYADSVKGRFTISSDNAKNTVYLQMSSLKPEDTAVYYCAADGNVWSPPICGSAGPPPGGMDYWGKGTQVTVSSAAAYPYDVPDYGSHHHHHH

SEQ ID NO: 667 - protein, 144 aa, synthetic construct
  REGION 1..144: note = Synthetic Sequence
QVQLQESGGGLVQAGGSLRLSCAASGRTFSSYAMAWFRQAPGKEREFVAAIAWSAGSTYYADSVKGRFAISRDNAENTVYLQMNSLKPEDTAVYYCAARIITVATMRLDSDYDYWGQGTQVTVSSAAAYPYDVPDYGSHHHHHH

SEQ ID NO: 668 - protein, 150 aa, synthetic construct
  REGION 1..150: note = Synthetic Sequence
QVQLQESGGGLVQAGGSLRLSCAASGFAFDGYAIGWFRQAPGKEREGVSCISSKEGSTYYADSVKGRFTISSDNAKNTVYLQMSSLKPEDTAVYYCAADGNVWSPPICGSAGPPPGGMDYWGKGTQVTVSSAAAYPYDVPDYGSHHHHHH

SEQ ID NO: 669 - protein, 152 aa, synthetic construct
  REGION 1..152: note = Synthetic Sequence
QVQLQESGGGLVQAGGSLRLSCAASGFSSDDYTIAWFRRAPGKEREGISCISSSDGSTGYADSVKGRFTITSDSAKNTVYLQMNSLKPEDTAVYYCAADSNVWSPPICGRTWYGPPPGGMDYWGKGTQVTVSSAAAYPYDVPDYGSHHHHHH

SEQ ID NO: 670 - protein, 152 aa, synthetic construct
  REGION 1..152: note = Synthetic Sequence
QVQLQESGGGLVQPGGSLRLSCAASGFSSDDYTIGWFRQAPGKEREGISCYSSRDGTTGYADSVKGRFTISSDNAKNTVYLQMNSLKPEDTAVYYCAADFNVWSPPICGSIWYGPPPGGMAYWGQGTQVTVSSAAAYPYDVPDYGSHHHHHH

SEQ ID NO: 671 - protein, 151 aa, synthetic construct
  REGION 1..151: note = Synthetic Sequence
QVQLQESGGGLVQAGGSLRLSCAASGFTFDDYTIGWFRQAPGKEREGISCISSDGSTGYADSVKGRFTISSDNAKNTVYLQMNSLKPEDTAVYYCAADFNVWSPPICGSNWYGPPPGGMDYWGKGTQVTVSSAAAYPYDVPDYGSHHHHHH

SEQ ID NO: 672 - protein, 152 aa, synthetic construct
  REGION 1..152: note = Synthetic Sequence
QVQLQESGGGLVQAGGSLRLSCAASGFSSDDYTIGWFRQAPGKEREGISCYSSSDGSTGYADSVKGRFTISSDNAKNTVYLQMNSLKPEDTAVYYCAADFNVWSPPICGSSWYGPPPGGMDYWGKGTQVTVSSAAAYPYDVPDYGSHHHHHH

SEQ ID NO: 673 - protein, 152 aa, synthetic construct
  REGION 1..152: note = Synthetic Sequence
QVQLQESGGGLVQAGGSLRLSCAASGFSSDDYTIGWFRQAPGKEREGISCFSSSDGSTGFADSVKGRFTISSDNATNTVYLEMNSLKPEDTAVYYCAADFNVWSPPICGSRWYGPPPGGMEYWGKGTQVTVSSAAAYPYDVPDYGSHHHHHH

SEQ ID NO: 674 - protein, 150 aa, synthetic construct
  REGION 1..150: note = Synthetic Sequence
QVQLQESGGGLVQAGGSLRLSCATFGFSFDDYAIAWFRQAPGKEREGISCISNTDSSTFYADSVKGRFTISSDNAKNTVHLQMSSLKPEDTAVYYCAADGNVWSPPICGSAGPPPGGMDYWGKGTQVTVSSAAAYPYDVPDYGSHHHHHH

SEQ ID NO: 675 - protein, 152 aa, synthetic construct
  REGION 1..152: note = Synthetic Sequence
QVQLQESGGGLVQAGGSLRLSCAASGFSSDDYTIGWFRQAPGKEREGISCYSSSDGSTGFADSVKGRFTISSDNAKNTVYLQMNSLRPEDTAVYYCAADFNVWSPPICGSRWYGPPPGGMAYWGKGTQVTVSSAAAYPYDVPDYGSHHHHHH

SEQ ID NO: 676 - protein, 151 aa, synthetic construct
  REGION 1..151: note = Synthetic Sequence
QVQLQESGGGLVQVGGSLRLSCTISGFTGNDLAIGWFRQAPGKDQREGISCISNTDSSTYYADSVKGRFTISSDNAKNTVHLQMSSLKPEDTAVYYCAADGNVWSPPICGSAGPPPGGMDYWGKGTQVTVSSAAAYPYDVPDYGSHHHHHH

SEQ ID NO: 677 - protein, 152 aa, synthetic construct
  REGION 1..152: note = Synthetic Sequence
QVQLQESGGGLVQAGGSLRLSCAASGFSSDDYTIAWFRRAPGKEREGISCISSSDGSTGYADSVKGRFTISSDNAKNTVYLQMTSLKPEDTAVYYCAADSNVWSPPICGKTWYGPPPGGMDYWGKGTQVTVSSAAAYPYDVPDYGSHHHHHH

SEQ ID NO: 678 - protein, 140 aa, synthetic construct
  REGION 1..140: note = Synthetic Sequence
QVQLQESGGGLVQAGDSLRLSCAGSEGTLSSYGIGWFRQAPGKEREFVGGINWSGDSTDYADSVKGRFTISRDSAKNTVYLQMNSLKPEDTAVYYCAAGESGVWVGGLDYWGQGTQVTVSSAAAYPYDVPDYGSHHHHHH

SEQ ID NO: 679 - protein, 152 aa, synthetic construct
  REGION 1..152: note = Synthetic Sequence
QVQLQESGGGLVQAGGSLRLSCAASGFSSDDYTIAWFRRAPGKEREGISCFSSSDGSAGYADSVKGRFTVSSDNAKNTVYLQMNSLKPEDTAVYYCAADSNVWSPPICGSTWYGPPPGGMAYWGKGTQVTVSSAAAYPYDVPDYGSHHHHHH

SEQ ID NO: 680 - protein, 150 aa, synthetic construct
  REGION 1..150: note = Synthetic Sequence
QVQLQESGGGLVQAGGSLRLSCATSGFTFDDYAIAWFRQAPGKEREGVSCISNTDSSTYYADSVKGRFTISSDNAKNTVYLQMSSLKPEDTAVYYCAADGNVWSPPICGSAGPPPGGMDYWGKGTQVTVSSAAAYPYDVPDYGSHHHHHH

SEQ ID NO: 681 - protein, 152 aa, synthetic construct
  REGION 1..152: note = Synthetic Sequence
QVQLQESGGGLVQAGGSLRLSCEVSGLSSDDYTIGWFRQAPGKEREGFSCFSTRDGNAGYADSVKGRFTISSDNAKNTVYLQMNNLKPEDTAVYYCAADFNVWSPPICGSRWYGPPPGGMDYWGKGTQVTVSSAAAYPYDVPDYGSHHHHHH

SEQ ID NO: 682 - protein, 152 aa, synthetic construct
  REGION 1..152: note = Synthetic Sequence
QVQLQESGGGLVQAGGSLRLSCEVSGLSSDDYTIGWFRQAPGKKREGFSCFSSRDGSTGYADSVKGRFTISSDNAKNTVYLQMNSLKPEDTAVYYCAADFNVWSPPICGSRWYGPPPGGMDYWGKGTQVTVSSAAAYPYDVPDYGSHHHHHH

SEQ ID NO: 683 - protein, 152 aa, synthetic construct
  REGION 1..152: note = Synthetic Sequence
QVQLQESGGGLVQAGGSLRLSCAASGFSSDDYTIGWFRQAPGKEREGFSCFSSRDGSTGYADSVKGRFTISSDNAKNTVYLQMNSLKPEDTAVYYCAADFNVWSPPICGSRWYGPPPGGMDYWGKGTQVTVSSAAAYPYDVPDYGSHHHHHH

SEQ ID NO: 684 - protein, 151 aa, synthetic construct
  REGION 1..151: note = Synthetic Sequence
QVQLQESGGGLVQAGGSLRLSCAASGFSFDDYTIGWFRQVPGKEREGISCISSDGSTGYADSVKGRFTISSDNAKNTVYLQINSLKPEDTAVYYCAADFNVWSPPICGSIWYGPPPGGMDYWGKGTQVTVSSAAAYPYDVPDYGSHHHHHH

SEQ ID NO: 685 - protein, 150 aa, synthetic construct
  REGION 1..150: note = Synthetic Sequence
QVQLQESGGGLVQAGGSLRLSCATFGFTFDDYAIAWFRQAPGKEREGISCISNTDSSTYYADSVKGRFTISSDNAKNTVHLQMSSLKPEDTAVYYCAADGNVWSPPICGSAGPPPGGMDYWGKGTQVTVSSAAAYPYDVPDYGSHHHHHH

SEQ ID NO: 686 - protein, 150 aa, synthetic construct
  REGION 1..150: note = Synthetic Sequence
  SITE 19: note = misc_feature - Xaa can be any naturally occurring amino acid
QVQLQESGGGLVQAGGSLXLSCAASGFTFDDYAIGWFRQAPGKEREGVSCISSPDGSTYYADSVKGRFTISSDNAKNTVYLQMNSLKPEDTAVYYCAADFNVWSPPICGSVGPPPGGMDYWGKGTQVTVSSAAAYPYDVPDYGSHHHHHH

SEQ ID NO: 687 - protein, 152 aa, synthetic construct
  REGION 1..152: note = Synthetic Sequence
QVQLQESGGGLVQAGASLRLSCKASGFTFGDYTIGWFRQAPGKEREGISCYSSSDGNTGYADSVKGRFTISSDNAKNTVYLQMNSLRPEDTAVYYCAADFNVWSPPICGSSWYGPPPGGMAYWGKGTQVTVSSAAAYPYDVPDYGSHHHHHH

SEQ ID NO: 688 - protein, 140 aa, synthetic construct
  REGION 1..140: note = Synthetic Sequence
QVQLQESGGGLVQAGDSLRLSCAGSEGTFSSYGIGWFRQAPGKEREFVGGINWSGDSTDYADSVKGRFTISRDNAKNTVYLQMNSLKPEDTAVYYCAAGESGVWVGGLDYWGQGTQVTVSSAAAYPYDVPDYGSHHHHHH

SEQ ID NO: 689 - protein, 152 aa, synthetic construct
  REGION 1..152: note = Synthetic Sequence
QVQLQESGGGLVQAGGSLRLSCAASGFSSDDYTIGWFRQAPGKEREGISCFSSSDGSTGFADSVKGRFTISSDNATNTVYLQMNSLKPEDTAVYYCAADFNVWSPPICGSSWYGPPPGGMEYWGKGTQVTVSSAAAYPYDVPDYGSHHHHHH

SEQ ID NO: 690 - protein, 150 aa, synthetic construct
  REGION 1..150: note = Synthetic Sequence
QVQLQESGGGLVQAGDSLRLSCTASGVSIGDYNIGWFRQAPGKEREGVSCISSGDGTTYYTDSVKGRFTISTDNAKNTVYLQMNSLKPEDTAVYYCAADGNVWSPPICGSAGPPPGGMDYWGKGTQVTVSSAAAYPYDVPDYGSHHHHHH

SEQ ID NO: 691 - protein, 152 aa, synthetic construct
  REGION 1..152: note = Synthetic Sequence
QVQLQESGGGLVQAGGSLRLSCAASGFTFDDYTIAWFRQAPGGKEREGISCISSDGSTGYADSVKGRFTISSDNAKNMVYLQMNSLKPEDTALYYCAADFNVWSPPICSSNWYGPPPRGMDYWGKGTQVTVSSAAAYPYDVPDYGSHHHHHH

SEQ ID NO: 692 - protein, 151 aa, synthetic construct
  REGION 1..151: note = Synthetic Sequence
QVQLQESGGGLVQAGGSLRLSCAASGFTFDDYTIAWFRQAPGKEREGISCISSDGSTGYADSVRGRFTISSDNAKNTVYLQMNSLKPEDTAVYYCAADFNVWSPPICGSIWYGPPPRGMDYWGKGTQVTVSSAAAYPYDVPDYGSHHHHHH

SEQ ID NO: 693 - protein, 118 aa, synthetic construct
  REGION 1..118: note = Synthetic Sequence
EVQLVESGGGLVQPGGSLRLSCAASGFNIKDTYIHWVRQAPGKGLEWVARIDPANDNTLYASKFQGRATISADTSKNTAYLQMNSLRAEDTAVYYCGRGYGYYVFDHWGQGTLVTVSS

SEQ ID NO: 694 - protein, 118 aa, synthetic construct
  REGION 1..118: note = Synthetic Sequence
QVQLVQSGAEVKKPGATVKISCKVSGFNIKDTYIHWVQQAPGKGLEWMGRIDPANDNTLYASKFQGRVTITADTSTDTAYMELSSLRSEDTAVYYCARGYGYYVFDHWGQGTLVTVSS

SEQ ID NO: 695 - protein, 107 aa, synthetic construct
  REGION 1..107: note = Synthetic Sequence
DVQITQSPSSLSASVGDRVTITCRTSRSISQYLAWYQQKPGKVPKLLIYSGSTLQSGVPSRFSGSGSGTDFTLTISSLQPEDVATYYCQQHNENPLTFGGGTKVEIK

SEQ ID NO: 696 - protein, 288 aa, Homo sapiens
  REGION 1..288: note = MISC_FEATURE - human PD-1
MQIPQAPWPVVWAVLQLGWRPGWFLDSPDRPWNPPTFSPALLVVTEGDNATFTCSFSNTSESFVLNWYRMSPSNQTDKLAAFPEDRSQPGQDCRFRVTQLPNGRDFHMSVVRARRNDSGTYLCGAISLAPKAQIKESLRAELRVTERRAEVPTAHPSPSPRPAGQFQTLVVGVVGGLLGSLVLLVWVLAVICSRAARGTIGARRTGQPLKEDPSAVPVFSVDYGELDFQWREKTPEPPVPCVPEQTEYATIVFPSGMGTSSPARRGSADGPRSAQPLRPEDGHCSWPL

SEQ ID NO: 697 - protein, 10 aa, synthetic construct
  REGION 1..10: note = Synthetic Sequence
GFSMDYYAIA

SEQ ID NO: 698 - protein, 10 aa, synthetic construct
  REGION 1..10: note = Synthetic Sequence
GFSMDYYAIA

SEQ ID NO: 699 - protein, 10 aa, synthetic construct
  REGION 1..10: note = Synthetic Sequence
GFSVDYYAIA

SEQ ID NO: 700 - protein, 10 aa, synthetic construct
  REGION 1..10: note = Synthetic Sequence
GFSMDYYAIA

SEQ ID NO: 701 - protein, 10 aa, synthetic construct
  REGION 1..10: note = Synthetic Sequence
GGFNRVSYMG

SEQ ID NO: 702 - protein, 10 aa, synthetic construct
  REGION 1..10: note = Synthetic Sequence
GGFNRVSYMG

SEQ ID NO: 703 - protein, 10 aa, synthetic construct
  REGION 1..10: note = Synthetic Sequence
GIIKSINFMG

SEQ ID NO: 704 - protein, 10 aa, synthetic construct
  REGION 1..10: note = Synthetic Sequence
GFILDYYGIG

SEQ ID NO: 705 - protein, 10 aa, synthetic construct
  REGION 1..10: note = Synthetic Sequence
GLSLDYDGVG

SEQ ID NO: 706 - protein, 10 aa, synthetic construct
  REGION 1..10: note = Synthetic Sequence
GFILDYYGIG

SEQ ID NO: 707 - protein, 10 aa, synthetic construct
  REGION 1..10: note = Synthetic Sequence
GRTFSSLGMG

SEQ ID NO: 708 - protein, 10 aa, synthetic construct
  REGION 1..10: note = Synthetic Sequence
GRTFSSLGMG

SEQ ID NO: 709 - protein, 10 aa, synthetic construct
  REGION 1..10: note = Synthetic Sequence
GFAFGSYDMG

SEQ ID NO: 710 - protein, 10 aa, synthetic construct
  REGION 1..10: note = Synthetic Sequence
GFSFGNNDMS

SEQ ID NO: 711 - protein, 11 aa, synthetic construct
  REGION 1..11: note = Synthetic Sequence
CITGSDFMVDT

SEQ ID NO: 712 - protein, 11 aa, synthetic construct
  REGION 1..11: note = Synthetic Sequence
CITGSDFMVDT

SEQ ID NO: 713 - protein, 11 aa, synthetic construct
  REGION 1..11: note = Synthetic Sequence
CITGSDFMVDT

SEQ ID NO: 714 - protein, 11 aa, synthetic construct
  REGION 1..11: note = Synthetic Sequence
CITGSDFMVDT

SEQ ID NO: 715 - protein, 8 aa, synthetic construct
  REGION 1..8: note = Synthetic Sequence
SVTSGGEI

SEQ ID NO: 716 - protein, 8 aa, synthetic construct
  REGION 1..8: note = Synthetic Sequence
SVTSGGEI

SEQ ID NO: 717 - protein, 8 aa, synthetic construct
  REGION 1..8: note = Synthetic Sequence
STTSDGRT

SEQ ID NO: 718 - protein, 9 aa, synthetic construct
  REGION 1..9: note = Synthetic Sequence
CISSSDGST

SEQ ID NO: 719 - protein, 9 aa, synthetic construct
  REGION 1..9: note = Synthetic Sequence
CISSSDGST

SEQ ID NO: 720 - protein, 9 aa, synthetic construct
  REGION 1..9: note = Synthetic Sequence
CISSSDGST

SEQ ID NO: 721 - protein, 9 aa, synthetic construct
  REGION 1..9: note = Synthetic Sequence
AIAWNGAST

SEQ ID NO: 722 - protein, 9 aa, synthetic construct
  REGION 1..9: note = Synthetic Sequence
AIAWNGAST

SEQ ID NO: 723 - protein, 9 aa, synthetic construct
  REGION 1..9: note = Synthetic Sequence
GINSGGRIT

SEQ ID NO: 724 - protein, 9 aa, synthetic construct
  REGION 1..9: note = Synthetic Sequence
AINSGGGST

SEQ ID NO: 725 - protein, 19 aa, synthetic construct
  REGION 1..19: note = Synthetic Sequence
AVRSTANTLCPSHYSVMDY

SEQ ID NO: 726 - protein, 19 aa, synthetic construct
  REGION 1..19: note = Synthetic Sequence
AVRSTANTLCPSHYSVMDY

SEQ ID NO: 727 - protein, 19 aa, synthetic construct
  REGION 1..19: note = Synthetic Sequence
AVRSTANTLCPSHYSIMDY

SEQ ID NO: 728 - protein, 19 aa, synthetic construct
  REGION 1..19: note = Synthetic Sequence
AVRSTANTLCPSHYSVMDY

SEQ ID NO: 729 - protein, 14 aa, synthetic construct
  REGION 1..14: note = Synthetic Sequence
NADIWVSDARMYNY

SEQ ID NO: 730 - protein, 14 aa, synthetic construct
  REGION 1..14: note = Synthetic Sequence
NADIWVSDARMYNY

SEQ ID NO: 731 - protein, 14 aa, synthetic construct
  REGION 1..14: note = Synthetic Sequence
NADIWLPSDRMYNY

SEQ ID NO: 732 - protein, 13 aa, synthetic construct
  REGION 1..13: note = Synthetic Sequence
ATATLCDGGIWGY

SEQ ID NO: 733 - protein, 13 aa, synthetic construct
  REGION 1..13: note = Synthetic Sequence
ATATLCDGGIWGY

SEQ ID NO: 734 - protein, 13 aa, synthetic construct
  REGION 1..13: note = Synthetic Sequence
ATATLCDGGIWGY

SEQ ID NO: 735 - protein, 17 aa, synthetic construct
  REGION 1..17: note = Synthetic Sequence
AASGLGSVVVTANEYDY

SEQ ID NO: 736 - protein, 17 aa, synthetic construct
  REGION 1..17: note = Synthetic Sequence
AASGLGSVVVTANEYDY

SEQ ID NO: 737 - protein, 15 aa, synthetic construct
  REGION 1..15: note = Synthetic Sequence
AQGDRSSWHYYGMDY

SEQ ID NO: 738 - protein, 13 aa, synthetic construct
  REGION 1..13: note = Synthetic Sequence
ATKSDPMTNEYDL

SEQ ID NO: 739 - protein, 147 aa, synthetic construct
  REGION 1..147: note = Synthetic Sequence
QVQLQESGGGLVQPGGSLRLSCAASGFSMDYYAIAWFRQAPGKEREEISCITGSDFMVDTYYVASVKGRFTISRDNAENTAYLQMNNLKPEDTGVYFCAVRSTANTLCPSHYSVMDYWGKGTQVTVSSAAAYPYDVPDYGSHHHHHH

SEQ ID NO: 740 - protein, 147 aa, synthetic construct
  REGION 1..147: note = Synthetic Sequence
QVQLQESGGGLVQAGGSLRLSCAASGFSMDYYAIAWFRQAPGKEREEISCITGSDFMVDTYYVASVKGRFTISRDNAENTAYLQMNNLKPEDTGVYFCAVRSTANTLCPSHYSVMDYWGKGTQVTVSSAAAYPYDVPDYGSHHHHHH

SEQ ID NO: 741 - protein, 147 aa, synthetic construct
  REGION 1..147: note = Synthetic Sequence
QVQLQESGGGLVQPGGSLRLSCSASGFSVDYYAIAWFRQAPGKEREEISCITGSDFMVDTYYVASVKGRFTISRDNAKNTAYLQMNSLKPEDTGVYFCAVRSTANTLCPSHYSIMDYWGKGTQVTVSSAAAYPYDVPDYGSHHHHHH

SEQ ID NO: 742 - protein, 147 aa, synthetic construct
  REGION 1..147: note = Synthetic Sequence
QVQLQESGGGLVQPGGSLRLSCSASGFSMDYYAIAWFRQAPGKEREEISCITGSDFMVDTYYVASVKGRFTISRDNAKNTAHLQMNSLKPEDTGVYFCAVRSTANTLCPSHYSVMDYWGKGTQVTVSSAAAYPYDVPDYGSHHHHHH

SEQ ID NO: 743 - protein, 139 aa, synthetic construct
  REGION 1..139: note = Synthetic Sequence
QVQLQESGGGLVQAGGSLRLSCAASGGFNRVSYMGWYRQAPGTKRELVASVTSGGEITIADSVKGRFTVSRDNSKNTLYLQMNGLKPEDGATYWCNADIWVSDARMYNYWGQGTQVTVSSAAAYPYDVPDYGSHHHHHH

SEQ ID NO: 744 - protein, 139 aa, synthetic construct
  REGION 1..139: note = Synthetic Sequence
QVQLQESGGGLVQTGESLRLSCAASGGFNRVSYMGWYRQAPGSKRELVASVTSGGEITVADSVKGRFTVSRDNNKNTLYLQMNGLKPEDGATYWCNADIWVSDARMYNYWGQGTQVTVSSAAAYPYDVPDYGSHHHHHH

SEQ ID NO: 745 - protein, 139 aa, synthetic construct
  REGION 1..139: note = Synthetic Sequence
QVQLQESGGGLVQTGESLRLSCAASGIIKSINFMGWYRQPPGTKRELVASTTSDGRTTVADSVKGRFTISRDNAKNTIYLEMSSLKPEDTATYWCNADIWLPSDRMYNYWGQGTQVTVSSAAAYPYDVPDYGSHHHHHH

SEQ ID NO: 746 - protein, 139 aa, synthetic construct
  REGION 1..139: note = Synthetic Sequence
QVQLQESGGGLVQAGGSLRLSCAVSGFILDYYGIGWFRQAPGKEREAVSCISSSDGSTYYADSVKGRFTISRDNALNTLYLQMNSLKPEDTAVYHCATATLCDGGIWGYWGQGTQVTVSSAAAYPYDVPDYGSHHHHHH

SEQ ID NO: 747 - protein, 139 aa, synthetic construct
  REGION 1..139: note = Synthetic Sequence
QVQLQESGGGLAQAGGSLRLSCEGSGLSLDYDGVGWFRQAPGKEREAVSCISSSDGSTYYADSVKGRFTISRGNALNTLYLQMNSLKPEDTAVYYCATATLCDGGIWGYWGQGTQVTVSSAAAYPYDVPDYGSHHHHHH

SEQ ID NO: 748 - protein, 139 aa, synthetic construct
  REGION 1..139: note = Synthetic Sequence
QVQLQESGGGSVQPGGSLRLSCAVSGFILDYYGIGWFRQAPGKEREAVSCISSSDGSTYYADSVKGRFTISRDNALNTLYLQMNSLKPEDTAVYYCATATLCDGGIWGYWGQGTQVTVSSAAAYPYDVPDYGSHHHHHH

SEQ ID NO: 749 - protein, 143 aa, synthetic construct
  REGION 1..143: note = Synthetic Sequence
QVQLQESGGGSVQAGDSLRLSCTASGRTFSSLGMGWFRQAPGKEREFVSAIAWNGASTYYTESVKGRFTISRDDAKNTVYLQMNSLKPTDTAVYFCAASGLGSVVVTANEYDYWGQGTQVTVSSAAAYPYDVPDYGSHHHHHH

SEQ ID NO: 750 - protein, 143 aa, synthetic construct
  REGION 1..143: note = Synthetic Sequence
QVQLQESGGGSVQPGKSLRLSCAASGRTFSSLGMGWFRQAPGKEREFVSAIAWNGASTYYTESVKGRFTISRDDAKNTVYLQMNSLKPTDTAVYFCAASGLGSVVVTANEYDYWGQGTQVTVSSAAAYPYDVPDYGSHHHHHH

SEQ ID NO: 751 - protein, 141 aa, synthetic construct
  REGION 1..141: note = Synthetic Sequence
QVQLQESGGGLVQPGGSLRLSCTTSGFAFGSYDMGWVRQAPGKGPEWVSGINSGGRITDYADSVTGRFTISRDNAKNTLYLQMNSLKPEDTAVYYCAQGDRSSWHYYGMDYWGKGTQVTVSSAAAYPYDVPDYGSHHHHHH

SEQ ID NO: 752 - protein, 139 aa, synthetic construct
  REGION 1..139: note = Synthetic Sequence
  SITE 112: note = misc_feature - Xaa can be any naturally occurring amino acid
QVQLQESGGGLVQPGGSLRLSCAASGFSFGNNDMSWVRQAPGKGPEWVSAINSGGGSTYYADSVKGRFTISRDNAKNTLYLQMNSLKPEDTAVYYCATKSDPMTNEYDLWGXGTQVTVSSAAAYPYDVPDYGSHHHHHH

SEQ ID NO: 753 - protein, 447 aa, synthetic construct
  REGION 1..447: note = Synthetic Sequence
QVQLVQSGVEVKKPGASVKVSCKASGYTFTNYYMYWVRQAPGQGLEWMGGINPSNGGTNFNEKFKNRVTLTTDSSTTTAYMELKSLQFDDTAVYYCARRDYRFDMGFDYWGQGTTVTVSSASTKGPSVFPLAPCSRSTSESTAALGCLVKDYFPEPVTVSWNSGALTSGVHTFPAVLQSSGLYSLSSVVTVPSSSLGTKTYTCNVDHKPSNTKVDKRVESKYGPPCPPCPAPEFLGGPSVFLFPPKPKDTLMISRTPEVTCVVVDVSQEDPEVQFNWYVDGVEVHNAKTKPREEQFNSTYRVVSVLTVLHQDWLNGKEYKCKVSNKGLPSSIEKTISKAKGQPREPQVYTLPPSQEEMTKNQVSLTCLVKGFYPSDIAVEWESNGQPENNYKTTPPVLDSDGSFFLYSRLTVDKSRWQEGNVFSCSVMHEALHNHYTQKSLSLSLGK

SEQ ID NO: 754 - protein, 218 aa, synthetic construct
  REGION 1..218: note = Synthetic Sequence
EIVLTQSPATLSLSPGERATLSCRASKGVSTSGYSYLHWYQQKPGQAPRLLIYLASYLESGVPARFSGSGSGTDFTLTISSLEPEDFAVYYCQHSRDLPLTFGGGTKVEIKRTVAAPSVFIFPPSDEQLKSGTASVVCLLNNFYPREAKVQWKVDNALQSGNSQESVTEQDSKDSTYSLSSTLTLSKADYEKHKVYACEVTHQGLSSPVTKSFNRGEC

SEQ ID NO: 755 - protein, 440 aa, synthetic construct
  REGION 1..440: note = Synthetic Sequence
QVQLVESGGGVVQPGRSLRLDCKASGITFSNSGMHWVRQAPGKGLEWVAVIWYDGSKRYYADSVKGRFTISRDNSKNTLFLQMNSLRAEDTAVYYCATNDDYWGQGTLVTVSSASTKGPSVFPLAPCSRSTSESTAALGCLVKDYFPEPVTVSWNSGALTSGVHTFPAVLQSSGLYSLSSVVTVPSSSLGTKTYTCNVDHKPSNTKVDKRVESKYGPPCPPCPAPEFLGGPSVFLFPPKPKDTLMISRTPEVTCVVVDVSQEDPEVQFNWYVDGVEVHNAKTKPREEQFNSTYRVVSVLTVLHQDWLNGKEYKCKVSNKGLPSSIEKTISKAKGQPREPQVYTLPPSQEEMTKNQVSLTCLVKGFYPSDIAVEWESNGQPENNYKTTPPVLDSDGSFFLYSRLTVDKSRWQEGNVFSCSVMHEALHNHYTQKSLSLSLGK

SEQ ID NO: 756 - protein, 214 aa, synthetic construct
  REGION 1..214: note = Synthetic Sequence
EIVLTQSPATLSLSPGERATLSCRASQSVSSYLAWYQQKPGQAPRLLIYDASNRATGIPARFSGSGSGTDFTLTISSLEPEDFAVYYCQQSSNWPRTFGQGTKVEIKRTVAAPSVFIFPPSDEQLKSGTASVVCLLNNFYPREAKVQWKVDNALQSGNSQESVTEQDSKDSTYSLSSTLTLSKADYEKHKVYACEVTHQGLSSPVTKSFNRGEC

SEQ ID NO: 757 - protein, 106 aa, synthetic construct
  REGION 1..106: note = Synthetic Sequence
EIVLTQSPSSLSASVGDRVTITCSARSSVSYMHWYQQKPGKAPKLLIYRTSNLASGVPSRFSGSGSGTDFTLTINSLQPEDFATYYCQQRSSFPLTFGGGTKLEIK

SEQ ID NO: 758 - protein, 106 aa, synthetic construct
  REGION 1..106: note = Synthetic Sequence
EIVLTQSPSSLSASVGDRVTITCSARSSVSYMHWFQQKPGKAPKLWIYRTSNLASGVPSRFSGSGSGTDYTLTINSLQPEDFATYYCQQRSSFPLTFGGGTKLEIK

SEQ ID NO: 759 - protein, 106 aa, synthetic construct
  REGION 1..106: note = Synthetic Sequence
EIVLTQSPSSLSASVGDRVTITCSARSSVSYMHWFQQKPGKAPKLWIYRTSNLASGVPSRFSGSGSGTDYCLTINSLQPEDFATYYCQQRSSFPLTFGGGTKLEIK

SEQ ID NO: 760 - protein, 106 aa, synthetic construct
  REGION 1..106: note = Synthetic Sequence
EIVLTQSPSSLSASVGDRVTITCSARSSVSYMHWFQQKPGKAPKLWIYRTSNLASGVPSRFSGSGSGTSYCLTINSLQPEDFATYYCQQRSSFPLTFGGGTKLEIK

SEQ ID NO: 761 - protein, 117 aa, synthetic construct
  REGION 1..117: note = Synthetic Sequence
QVQLVQSGSELKKPGASVKISCKASGYSFSNYGMNWVRQAPGQGLQWMGWINTDSGESTYAEEFKGRFVFSLDTSVSTAYLQITSLTAEDTGMYFCAKVGYDALDYWGQGTLVTVSS

SEQ ID NO: 762 - protein, 117 aa, synthetic construct
  REGION 1..117: note = Synthetic Sequence
QVQLVQSGSELKKPGASVKISCKASGYTFTNYGMNWVRQAPGQGLQWMGWINTDSGESTYAEEFKGRFVFSLDTSVSTAYLQITSLTAEDTGMYFCAKVGYDALDYWGQGTLVTVSS

SEQ ID NO: 763 - protein, 117 aa, synthetic construct
  REGION 1..117: note = Synthetic Sequence
QVQLVQSGSELKKPGASVKISCKASGYTFTNYGMNWVRQAPGQGLQWMGWINTDSGESTYAEEFKGRFVFSLDTSVNTAYLQITSLTAEDTGMYFCVRVGYDALDYWGQGTLVTVSS

SEQ ID NO: 764 - protein, 117 aa, synthetic construct
  REGION 1..117: note = Synthetic Sequence
QIQLVQSGSELKKPGASVKISCKASGYTFTNYGMNWVRQAPGQGLQWMGWINTDSGESTYAEEFKGRFVFSLDTSVNTAYLQITSLTAEDTGMYFCVRVGYDALDYWGQGTLVTVSS

SEQ ID NO: 765 - protein, 117 aa, synthetic construct
  REGION 1..117: note = Synthetic Sequence
QIQLVQSGSELKKPGASVKISCKASGYTFTNYGMNWVKQAPGQGLKWMGWINTDSGESTYAEEFKGRFAFSLDTSVNTAYLQITSLNAEDTGMYFCVRVGYDALDYWGQGTLVTVSS

SEQ ID NO: 766 - protein, 254 aa, synthetic construct
  REGION 1..254: note = Synthetic Sequence
LFTVTVPKELYIIEHGSNVTLECNFDTGSHVNLGAITASLQKVENDTSPHRERATLLEEQLPLGKASFHIPQVQVRDEGQYQCIIIYGVAWDYKYLTLKVKASYRKINTHILKVPETDEVELTCQATGYPLAEVSWPNVSVPANTSHSRTPEGLYQVTSVLRLKPPPGRNFSCVFWNTHVRELTLASIDLQSQMEPRTHPTWLLHIFIPFCIIAFIFIATVIALRKQLCQKLYSSKDTTKRPVTTTKREVNSAI

SEQ ID NO: 767 - protein, 453 aa, synthetic construct
  REGION 1..453: note = Synthetic Sequence
MIFLLLMLSLELQLHQIAALFTVTVPKELYIIEHGSNVTLECNFDTGSHVNLGAITASLQKVENDTSPHRERATLLEEQLPLGKASFHIPQVQVRDEGQYQCIIIYGVAWDYKYLTLKVKASYRKINTHILKVPETDEVELTCQATGYPLAEVSWPNVSVPANTSHSRTPEGLYQVTSVLRLKPPPGRNFSCVFWNTHVRELTLASIDLQSQMEPRTHPTWEPKSCDKTHTCPPCPAPELLGGPSVFLFPPKPKDTLMISRTPEVTCVVVDVSHEDPEVKFNWYVDGVEVHNAKTKPREEQYNSTYRVVSVLTVLHQDWLNGKEYKCKVSNKALPAPIEKTISKAKGQPREPQVYTLPPSRDELTKNQVSLTCLVKGFYPSDIAVEWESNGQPENNYKTTPPVLDSDGSFFLYSKLTVDKSRWQQGNVFSCSVMHEALHNHYTQKSLSLSPGK

SEQ ID NO: 768 - protein, 119 aa, synthetic construct
  REGION 1..119: note = Synthetic Sequence
EVQLQQSGPVLVKPGASVKMSCKASGYTFTDYYMNWVKQSHGKSLEWIGNINPYNGGTTYNQKFKGKATLTVDKSSRTAYMEINSLTSEDSAVYYCARGRIYDGSLDYWGQGTALTVSS

SEQ ID NO: 769 - protein, 106 aa, synthetic construct
  REGION 1..106: note = Synthetic Sequence
DIQMTQFPSSLCASQGGKVTVTCKASQDINNYMAWYQHKPGKGPRLLIHYTSTLLSGIPSRFSGSGSGRDYSFSISNLEPEDIATYYCLQYDNLWTFGGGTKLEIK

SEQ ID NO: 770 - protein, 116 aa, synthetic construct
  REGION 1..116: note = Synthetic Sequence
QVQLQQSGAELAKPGASVRLSCKASGYTFTNYWMHWVKQRPGQGLEWIGHINPSSGFTTYNQNFKDKATLTADKSSNTAYMQLSSLTYEDSAVYFCAREDYDVDYWGQGTTLTVSS

SEQ ID NO: 771 - protein, 107 aa, synthetic construct
  REGION 1..107: note = Synthetic Sequence
DIVMTQSQKFMSTSVGDRVSVTCKASQSVDTNVAWYQQKPGQSPKALIFSASYRYSGVPDRFTGSGSGTDFTLTINSVQSEDLAEYFCQQYNSYPYTFGSGTKLEIK

SEQ ID NO: 772 - protein, 122 aa, synthetic construct
  REGION 1..122: note = Synthetic Sequence
EVQLVESGGGLVKPGGSLKLSCAASGFTFSDYGMHWVRQAPEKGLEWVAYISSGSYTIYYTDTVKGRFTISRDNAKNTLFLQMTSLRSEDTAMYYCARRGYGSFYEYYFDYWGQGTTLTVSS

SEQ ID NO: 773 - protein, 106 aa, synthetic construct
  REGION 1..106: note = Synthetic Sequence
QIVLTQSPALMSASPGEKVTMTCSASSSVSYMYWYQQKPRSSPKPWIYLTSNLASGVPARFSGSGSGTSYSLTISSMEAEDAATYYCQQWSSNPFTFGSGTKLEIK

SEQ ID NO: 774 - protein, 119 aa, synthetic construct
  REGION 1..119: note = Synthetic Sequence
EVQLVESGGGLVQAGKSLRLSCAASGSIFSIHAMGWFRQAPGKEREFVAAITWSGGITYYEDSVKGRFTISRDNAKNTVYLQMNSLKPEDTAIYYCAADRAESSWYDYWGQGTQVTVSS

SEQ ID NO: 775 - protein, 119 aa, synthetic construct
  REGION 1..119: note = Synthetic Sequence
EVQLVESGGGLVQAGGSLRLSCAASGSIASIHAMGWFRQAPGKEREFVAVITWSGGITYYADSVKGRFTISRDNAKNTVYLQMNSLKPEDTAIYYCAGDKHQSSWYDYWGQGTQVTVSS

SEQ ID NO: 776 - protein, 119 aa, synthetic construct
  REGION 1..119: note = Synthetic Sequence
EVQLVESGGGLVQAGGSLRLSCAASGSISSIHAMGWFRQAPGKEREFVAAITWSGGITYYADSLKGRFTISRDNAKNTGYLQMNSLKPEDTAIYYCAADRAQSSWYDYWGQGTQVTVSS

SEQ ID NO: 777 - protein, 119 aa, synthetic construct
  REGION 1..119: note = Synthetic Sequence
EVQLVESGGGLVQAGGSLGLSCAASGSIFSINAMAWFRQAPGKEREFVALISWSGGSTYYEDSVKGRFTISRDNAKNTVYLQMNSLKPEDTAIYYCAADRVDSNWYDYWGQGTQVTVSS

SEQ ID NO: 778 - protein, 120 aa, synthetic construct
  REGION 1..120: note = Synthetic Sequence
EVQLVESGGGLVQAGGSLRLSCAASGRAFSSGTMGWFRRAPGKEREFVASIPWSGGRIYYADSVKGRFTISRDNAQNTVYLQMNSLKPEDTAVYYCAVKERSTGWDFASWGQCTQVTVSS

SEQ ID NO: 779 - protein, 121 aa, synthetic construct
  REGION 1..121: note = Synthetic Sequence
QVQLVQSGAELKQPGASVKMSCKASGYSFTSSWIHWVKQAPGQGLEWIGYIYPSTGFTEYNQKFKDRATLTADKSTSTAYMELSSLRSEDSAVYYCARWRDSSGYHAMDYWGQGTSVTVSS

SEQ ID NO: 780 - protein, 122 aa, synthetic construct
  REGION 1..122: note = Synthetic Sequence
QVQLVQSGAEVKQPGASVKMSCKASGYSFTSSWIHWVKQAPGQGLEWIGYIYPSTGFTEYNQKFKDRATLTADKSTSTAYMELSSLRSEDTAVYYDCARWRDSSGYHAMDYWGQGTSVTVSS

SEQ ID NO: 781 - protein, 121 aa, synthetic construct
  REGION 1..121: note = Synthetic Sequence
QVQLVQSGHEVKQPGASVKMSCKASGYSFTSSWIHWVKQAPGQGLEWIGYIYPSTGFTEYNQKFKDRATLTADKSTSTAYMELSSLRSEDTAVYYCARWRDSSGYHAMDYWGQGTLVTVSS

SEQ ID NO: 782 - protein, 121 aa, synthetic construct
  REGION 1..121: note = Synthetic Sequence
QVQLVQSGHEVKQPGASVKMSCKASGYSFTSSWIHWVRQAPGQGLEWIGYIYPSTGFTEYNQKFKDRATLTADKSTSTAYMELSSLRSEDTAVYYCARWRDSSGYHAMDYWGQGTLVTVSS

SEQ ID NO: 783 - protein, 121 aa, synthetic construct
  REGION 1..121: note = Synthetic Sequence
QVQLVQSGHEVKQPGASVKVSCKASGYSFTSSWIHWVRQAPGQGLEWIGYIYPSTGFTEYNQKFKDRATITADKSTSTAYMELSSLRSEDTAVYYCARWRDSSGYHAMDYWGQGTLVTVSS

SEQ ID NO: 784 - protein, 111 aa, synthetic construct
  REGION 1..111: note = Synthetic Sequence
DIVLTQSPASLTLSPGQRLTISCRASQSVSTSGYSYMHWYQQKPDQSPKLLIKFGSNLESGIPARFSGSGSGTDFTLTISSLEEEDFATYYCQHSWEIPYTFGQGTKLEIK

SEQ ID NO: 785 - protein, 111 aa, synthetic construct
  REGION 1..111: note = Synthetic Sequence
DIVLTQSPATLSLSPGQRLTISCRASQSVSTSGYSYMHWYQQKPDQSPKLLIKFGSNLESGIPARFSGSGSGTDFTLTISSLEPEDFATYYCQHSWEIPYTFGQGTKLEIK

SEQ ID NO: 786 - protein, 111 aa, synthetic construct
  REGION 1..111: note = Synthetic Sequence
EIVLTQSPATLSLSPGQRLTISCRASQSVSTSGYSYMHWYQQKPDQSPKLLIKFGSNLESGIPARFSGSGSGTDFTLTISSLEPEDFATYYCQHSWEIPYTFGQGTKLEIK

SEQ ID NO: 787 - protein, 111 aa, synthetic construct
  REGION 1..111: note = Synthetic Sequence
DIVLTQSPATLSLSPGQRLTISCRASQSVSTSGYSYMHWYQQKPDQSPKLLIKFGSNLESGIPARFSGSGSGTDFTLTISSLEPEDFAVYYCQHSWEIPYTFGQGTKLEIK

SEQ ID NO: 788 - protein, 290 aa, Homo sapiens
MRIFAVFIFMTYWHLLNAFTVTVPKDLYVVEYGSNMTIECKFPVEKQLDLAALIVYWEMEDKNIIQFVHGEEDLKVQHSSYRQRARLLKDQLSLGNAALQITDVKLQDAGVYRCMISYGGADYKRITVKVNAPYNKINQRILVVDPVTSEHELTCQAEGYPKAEVIWTSSDHQVLSGKTTTTNSKREEKLFNVTSTLRINTTTNEIFYCTFRRLDPEENHTAELVIPELPLAHPPNERTHLVILGAILLCLGVALTFIFRLRKGRMMDVKKCGIQDTNSKKQSDTHLEET

SEQ ID NO: 789 - protein, 176 aa, Homo sapiens
MRIFAVFIFMTYWHLLNAPYNKINQRILVVDPVTSEHELTCQAEGYPKAEVIWTSSDHQVLSGKTTTTNSKREEKLFNVTSTLRINTTTNEIFYCTFRRLDPEENHTAELVIPELPLAHPPNERTHLVILGAILLCLGVALTFIFRLRKGRMMDVKKCGIQDTNSKKQSDTHLEET

SEQ ID NO: 790 - protein, 178 aa, Homo sapiens
MRIFAVFIFMTYWHLLNAFTVTVPKDLYVVEYGSNMTIECKFPVEKQLDLAALIVYWEMEDKNIIQFVHGEEDLKVQHSSYRQRARLLKDQLSLGNAALQITDVKLQDAGVYRCMISYGGADYKRITVKVNAPYNKINQRILVVDPVTSEHELTCQAEGYPKAEVIWTSSDHQVLSGD

SEQ ID NO: 791 - protein, 10 aa, synthetic construct
  REGION 1..10: note = Synthetic Sequence
GFTLDYYAIG

SEQ ID NO: 792 - protein, 10 aa, synthetic construct
  REGION 1..10: note = Synthetic Sequence
GTIFSINHMD

SEQ ID NO: 793 - protein, 10 aa, synthetic construct
  REGION 1..10: note = Synthetic Sequence
GFTFDDYGMS

SEQ ID NO: 794 - protein, 10 aa, synthetic construct
  REGION 1..10: note = Synthetic Sequence
GFTLDYYAIN

SEQ ID NO: 795 - protein, 10 aa, synthetic construct
  REGION 1..10: note = Synthetic Sequence
GTIFSINRMD

SEQ ID NO: 796 - protein, 10 aa, synthetic construct
  REGION 1..10: note = Synthetic Sequence
GFTFSSYGMS

SEQ ID NO: 797 - protein, 10 aa, synthetic construct
  REGION 1..10: note = Synthetic Sequence
GKIFSGNDMG

SEQ ID NO: 798 - protein, 10 aa, synthetic construct
  REGION 1..10: note = Synthetic Sequence
GTIFSINRMD

SEQ ID NO: 799 - protein, 10 aa, synthetic construct
  REGION 1..10: note = Synthetic Sequence
GFTFSSYGMS

SEQ ID NO: 800 - protein, 10 aa, synthetic construct
  REGION 1..10: note = Synthetic Sequence
GFTFNDYAMS

SEQ ID NO: 801 - protein, 10 aa, synthetic construct
  REGION 1..10: note = Synthetic Sequence
GFNLDPYAIA

SEQ ID NO: 802 - protein, 10 aa, synthetic construct
  REGION 1..10: note = Synthetic Sequence
GFTFTAYAMS

SEQ ID NO: 803 - protein, 10 aa, synthetic construct
  REGION 1..10: note = Synthetic Sequence
GFTFDYYAIG

SEQ ID NO: 804 - protein, 10 aa, synthetic construct
  REGION 1..10: note = Synthetic Sequence
GFNLDPYAIA

SEQ ID NO: 805 - protein, 10 aa, synthetic construct
  REGION 1..10: note = Synthetic Sequence
GTIFSINRMD

SEQ ID NO: 806 - protein, 10 aa, synthetic construct
  REGION 1..10: note = Synthetic Sequence
GTIFSINRMD

SEQ ID NO: 807 - protein, 10 aa, synthetic construct
  REGION 1..10: note = Synthetic Sequence
GFTFSSYGMS

SEQ ID NO: 808 - protein, 10 aa, synthetic construct
  REGION 1..10: note = Synthetic Sequence
GFNLDPYAIG

SEQ ID NO: 809 - protein, 10 aa, synthetic construct
  REGION 1..10: note = Synthetic Sequence
GFNLDPYAIA

SEQ ID NO: 810 - protein, 10 aa, synthetic construct
  REGION 1..10: note = Synthetic Sequence
ESIFSIEAMG

SEQ ID NO: 811 - protein, 10 aa, synthetic construct
  REGION 1..10: note = Synthetic Sequence
GKIFSGNDMG

SEQ ID NO: 812 - protein, 10 aa, synthetic construct
  REGION 1..10: note = Synthetic Sequence
GFTLDYYAIG

SEQ ID NO: 813 - protein, 10 aa, synthetic construct
  REGION 1..10: note = Synthetic Sequence
GFTFSSYGMS

SEQ ID NO: 814 - protein, 10 aa, synthetic construct
  REGION 1..10: note = Synthetic Sequence
GTIFSINRMD

SEQ ID NO: 815 - protein, 10 aa, synthetic construct
  REGION 1..10: note = Synthetic Sequence
GFTFSSYGMS

SEQ ID NO: 816 - protein, 10 aa, synthetic construct
  REGION 1..10: note = Synthetic Sequence
GFNLDPYAIA

SEQ ID NO: 817 - protein, 10 aa, synthetic construct
  REGION 1..10: note = Synthetic Sequence
GRTFSISAMG

SEQ ID NO: 818 - protein, 10 aa, synthetic construct
  REGION 1..10: note = Synthetic Sequence
GFTLDYYAIN

SEQ ID NO: 819 - protein, 10 aa, synthetic construct
  REGION 1..10: note = Synthetic Sequence
GFTFSSYGMS

SEQ ID NO: 820 - protein, 10 aa, synthetic construct
  REGION 1..10: note = Synthetic Sequence
GFTFNDYAMS

SEQ ID NO: 821 - protein, 10 aa, synthetic construct
  REGION 1..10: note = Synthetic Sequence
GFTLDYYAIG

SEQ ID NO: 822 - protein, 9 aa, synthetic construct
  REGION 1..9: note = Synthetic Sequence
ISSSDGSTY

SEQ ID NO: 823 - protein, 8 aa, synthetic construct
  REGION 1..8: note = Synthetic Sequence
ITSDGFPT

SEQ ID NO: 824 - protein, 9 aa, synthetic construct
  REGION 1..9: note = Synthetic Sequence
IRWNGGSTN

SEQ ID NO: 825 - protein, 9 aa, synthetic construct
  REGION 1..9: note = Synthetic Sequence
ISSSDGSTY

SEQ ID NO: 826 - protein, 8 aa, synthetic construct
  REGION 1..8: note = Synthetic Sequence
ITSDGTPT

SEQ ID NO: 827 - protein, 9 aa, synthetic construct
  REGION 1..9: note = Synthetic Sequence
IDSGGGSTS

SEQ ID NO: 828 - protein, 8 aa, synthetic construct
  REGION 1..8: note = Synthetic Sequence
ITSGGITD

SEQ ID NO: 829 - protein, 8 aa, synthetic construct
  REGION 1..8: note = Synthetic Sequence
ITSDGTPT

SEQ ID NO: 830 - protein, 9 aa, synthetic construct
  REGION 1..9: note = Synthetic Sequence
IDSGGGSTS

SEQ ID NO: 831 - protein, 9 aa, synthetic construct
  REGION 1..9: note = Synthetic Sequence
IRSNGGYTN

SEQ ID NO: 832 - protein, 9 aa, synthetic construct
  REGION 1..9: note = Synthetic Sequence
ISSSDVGTY

SEQ ID NO: 833 - protein, 9 aa, synthetic construct
  REGION 1..9: note = Synthetic Sequence
INSSDGSTY

SEQ ID NO: 834 - protein, 9 aa, synthetic construct
  REGION 1..9: note = Synthetic Sequence
ISGSDSSTY

SEQ ID NO: 835 - protein, 9 aa, synthetic construct
  REGION 1..9: note = Synthetic Sequence
ISSSDVGTY

SEQ ID NO: 836 - protein, 8 aa, synthetic construct
  REGION 1..8: note = Synthetic Sequence
ITSDGTPT

SEQ ID NO: 837 - protein, 8 aa, synthetic construct
  REGION 1..8: note = Synthetic Sequence
ITSDGTPA

SEQ ID NO: 838 - protein, 9 aa, synthetic construct
  REGION 1..9: note = Synthetic Sequence
IDSGGGSTS

SEQ ID NO: 839 - protein, 9 aa, synthetic construct
  REGION 1..9: note = Synthetic Sequence
ISSGDGSKY

SEQ ID NO: 840 - protein, 9 aa, synthetic construct
  REGION 1..9: note = Synthetic Sequence
ISSSDVGTY

SEQ ID NO: 841 - protein, 8 aa, synthetic construct
  REGION 1..8: note = Synthetic Sequence
IFGGGFTN

SEQ ID NO: 842 - protein, 8 aa, synthetic construct
  REGION 1..8: note = Synthetic Sequence
ITSGGITD

SEQ ID NO: 843 - protein, 9 aa, synthetic construct
  REGION 1..9: note = Synthetic Sequence
ISSSDGSTY

SEQ ID NO: 844 - protein, 9 aa, synthetic construct
  REGION 1..9: note = Synthetic Sequence
IDSGGGSTS

SEQ ID NO: 845 - protein, 8 aa, synthetic construct
  REGION 1..8: note = Synthetic Sequence
ITSDGTPT

SEQ ID NO: 846 - protein, 9 aa, synthetic construct
  REGION 1..9: note = Synthetic Sequence
IDSGGGSTS

SEQ ID NO: 847 - protein, 9 aa, synthetic construct
  REGION 1..9: note = Synthetic Sequence
ISSSDVGTY

SEQ ID NO: 848 - protein, 9 aa, synthetic construct
  REGION 1..9: note = Synthetic Sequence
ITWSGGSTS

SEQ ID NO: 849 - protein, 9 aa, synthetic construct
  REGION 1..9: note = Synthetic Sequence
ISSSDGSTY

SEQ ID NO: 850 - protein, 9 aa, synthetic construct
  REGION 1..9: note = Synthetic Sequence
IDSGGGSTS

SEQ ID NO: 851 - protein, 9 aa, synthetic construct
  REGION 1..9: note = Synthetic Sequence
IRSNGGYTN

SEQ ID NO: 852 - protein, 9 aa, synthetic construct
  REGION 1..9: note = Synthetic Sequence
ISSSDGSTY

SEQ ID NO: 853 - protein, 16 aa, synthetic construct
  REGION 1..16: note = Synthetic Sequence
DGWSSCRHGINEYLYW

SEQ ID NO: 854 - protein, 8 aa, synthetic construct
  REGION 1..8: note = Synthetic Sequence
SSGVYNYW

SEQ ID NO: 855 - protein, 12 aa, synthetic construct
  REGION 1..12: note = Synthetic Sequence
QGYYCSGYGCPR

SEQ ID NO: 856 - protein, 17 aa, synthetic construct
  REGION 1..17: note = Synthetic Sequence
SGWRLCRPTDEYDYSYW

SEQ ID NO: 857 - protein, 8 aa, synthetic construct
  REGION 1..8: note = Synthetic Sequence
SSGVYNYW

SEQ ID NO: 858 - protein, 14 aa, synthetic construct
  REGION 1..14: note = Synthetic Sequence
QGYYCSGYGCSDYW

SEQ ID NO: 859 - protein, 7 aa, synthetic construct
  REGION 1..7: note = Synthetic Sequence
RDRTIWW

SEQ ID NO: 860 - protein, 8 aa, synthetic construct
  REGION 1..8: note = Synthetic Sequence
SSGVYNYW

SEQ ID NO: 861 - protein, 14 aa, synthetic construct
  REGION 1..14: note = Synthetic Sequence
QGYYCSGYGCSDYW

SEQ ID NO: 862 - protein, 12 aa, synthetic construct
  REGION 1..12: note = Synthetic Sequence
QGYYCSGYGCYP

SEQ ID NO: 863 - protein, 15 aa, synthetic construct
  REGION 1..15: note = Synthetic Sequence
DGYYYCSDYPHPLYW

SEQ ID NO: 864 - protein, 15 aa, synthetic construct
  REGION 1..15: note = Synthetic Sequence
DGWRDCTWSNEYAYW

SEQ ID NO: 865 - protein, 15 aa, synthetic construct
  REGION 1..15: note = Synthetic Sequence
TGWRTCRGLNEYDYW

SEQ ID NO: 866 - protein, 15 aa, synthetic construct
  REGION 1..15: note = Synthetic Sequence
DGYYYCSDYPHPLYW

SEQ ID NO: 867 - protein, 8 aa, synthetic construct
  REGION 1..8: note = Synthetic Sequence
SSGVYNYW

SEQ ID NO: 868 - protein, 8 aa, synthetic construct
  REGION 1..8: note = Synthetic Sequence
SSGVYNYW

SEQ ID NO: 869 - protein, 14 aa, synthetic construct
  REGION 1..14: note = Synthetic Sequence
QGYYCSGYGCSDYW

SEQ ID NO: 870 - protein, 15 aa, synthetic construct
  REGION 1..15: note = Synthetic Sequence
DGYYYCSDYPHPLYW

SEQ ID NO: 871 - protein, 15 aa, synthetic construct
  REGION 1..15: note = Synthetic Sequence
DGYYYCSDYPHPLYW

SEQ ID NO: 872 - protein, 13 aa, synthetic construct
  REGION 1..13: note = Synthetic Sequence
DLVSGSSRLYDYW

SEQ ID NO: 873 - protein, 7 aa, synthetic construct
  REGION 1..7: note = Synthetic Sequence
RDRTIWW

SEQ ID NO: 874 - protein, 16 aa, synthetic construct
  REGION 1..16: note = Synthetic Sequence
DGWSSCRHGINEYLYW

SEQ ID NO: 875 - protein, 14 aa, synthetic construct
  REGION 1..14: note = Synthetic Sequence
QGYYCSGYGCSDYW

SEQ ID NO: 876 - protein, 8 aa, synthetic construct
  REGION 1..8: note = Synthetic Sequence
SSGVYNYW

SEQ ID NO: 877 - protein, 14 aa, synthetic construct
  REGION 1..14: note = Synthetic Sequence
QGYYCSGYGCSDYW

SEQ ID NO: 878 - protein, 15 aa, synthetic construct
  REGION 1..15: note = Synthetic Sequence
DGYYYCSDYPHPLYW

SEQ ID NO: 879 - protein, 18 aa, synthetic construct
  REGION 1..18: note = Synthetic Sequence
MGRTNYGVIYDPNMYNYW

SEQ ID NO: 880 - protein, 17 aa, synthetic construct
  REGION 1..17: note = Synthetic Sequence
SGWRLCRPTDEYDYLYW

SEQ ID NO: 881 - protein, 14 aa, synthetic construct
  REGION 1..14: note = Synthetic Sequence
QGYYCSGYGCSDYW

SEQ ID NO: 882 - protein, 12 aa, synthetic construct
  REGION 1..12: note = Synthetic Sequence
QGYYCSGYGCYP

SEQ ID NO: 883 - protein, 16 aa, synthetic construct
  REGION 1..16: note = Synthetic Sequence
DGWSSCRHGINEYLYW

SEQ ID NO: 884 - protein, 143 aa, synthetic construct
  REGION 1..143: note = Synthetic Sequence
QVQLQESGGGLVQAGGSLRLSCAASGFTLDYYAIGWFRQAPGKEREEVSCISSSDGSTYYADSVKGRFTISRDNAKNTVNLQMNSLKPEDTAVYYCATDGWSSCRHGINEYLYWGQGTQVTVSSAAAYPYDVPDYGSHHHHHH

SEQ ID NO: 885 - protein, 134 aa, synthetic construct
  REGION 1..134: note = Synthetic Sequence
QVQLQESGGGLVQAGGSLRLSCTASGTIFSINHMDWFRQAPGKQRELVALITSDGFPTYADSAKGRFTISRDNTKKTVSLQMNSLKPEDTAVYYCHVSSGVYNYWGQGTQVTVSSAAAYPYDVPDYGSHHHHHH

SEQ ID NO: 886 - protein, 138 aa, synthetic construct
  REGION 1..138: note = Synthetic Sequence
QVQLQESGGGLVQPGGSLRLSCAASGFTFDDYGMSWVRQAPGKGLEWVSAIRWNGGSTNYADSVKGRFTISRDNAKNTLYLQMNSLKSEDTAVYYCAQGYYCSGYGCPRGQGTQVTVSSAAAYPYDVPDYGSHHHHHH

SEQ ID NO: 887 - protein, 144 aa, synthetic construct
  REGION 1..144: note = Synthetic Sequence
QVQLQESGGGLVQPGGSLRLSCAASGFTLDYYAINWFRQAPGKEREEVSCISSSDGSTYYADSVKGRFTISRDNAKNTVYLQMNSLKPEDTAVYYCATSGWRLCRPTDEYDYSYWGQGTQVTVSSAAAYPYDVPDYGSHHHHHH

SEQ ID NO: 888 - protein, 134 aa, synthetic construct
  REGION 1..134: note = Synthetic Sequence
QVQLQESGGGVVQAGGSLRLSCTASGTIFSINRMDWFRQAPGKQRELVALITSDGTPTYADSAKGRFTISRDNTKKTVSLQMNSLKPEDTAVYYCHVSSGVYNYWGQGTQVTVSSAAAYPYDVPDYGSHHHHHH

SEQ ID NO: 889 - protein, 140 aa, synthetic construct
  REGION 1..140: note = Synthetic Sequence
QVQLQESGGGLVQTGGSLRLSCAASGFTFSSYGMSWVRQTPGKGPEWVSAIDSGGGSTSYADSVKGRFTISRDNAKNTLYLQMNSLKPEDTAVYYCAQGYYCSGYGCSDYWGQGTQVTVSSAAAYPYDVPDYGSHHHHHH

SEQ ID NO: 890 - protein, 133 aa, synthetic construct
  REGION 1..133: note = Synthetic Sequence
QVQLQESGGGLVQPGGSLRLSCAASGKIFSGNDMGWYRQAPGKQRELVGIITSGGITDYADAVKGRFTISRDNAKNMMYLQMNSLKPEDTAVYYCNMRDRTIWWGQGTQVTVSSAAAYPYDVPDYGSHHHHHH

SEQ ID NO: 891 - protein, 134 aa, synthetic construct
  REGION 1..134: note = Synthetic Sequence
QVQLQESGGGSVQAGGSLRLSCTASGTIFSINRMDWFRQAPGKQRELVALITSDGTPTYADSAKGRFTISRDNTKKTVSLQMNSLKPEDTAVYYCHVSSGVYNYWGQGTQVTVSSAAAYPYDVPDYGSHHHHHH

SEQ ID NO: 892 - protein, 140 aa, synthetic construct
  REGION 1..140: note = Synthetic Sequence
QVQLQESGGGLVQPGGSLRLSCAASGFTFSSYGMSWVRQTPGKGPEWVSAIDSGGGSTSYADSVKGRFTTSRDNAKNTLYLQMNSLKPEDTAVYYCAQGYYCSGYGCSDYWGQGTQVTVSSAAAYPYDVPDYGSHHHHHH

SEQ ID NO: 893 - protein, 138 aa, synthetic construct
  REGION 1..138: note = Synthetic Sequence
QVQLQESGGGLVQPGGSLRLSCAASGFTFNDYAMSWVRQAPGKGLEWVSGIRSNGGYTNYADSVKGRFTISRDNAKNTLYLQMNSLKSEDTAVYYCAQGYYCSGYGCYPGQGTQVTVSSAAAYPYDVPDYGSHHHHHH

SEQ ID NO: 894 - protein, 142 aa, synthetic construct
  REGION 1..142: note = Synthetic Sequence
QVQLQESGGGLVQAGGSLRLSCAASGFNLDPYAIAWFRQAPGKEREEVSCISSSDVGTYYADSVKGRFTISRDNAKKTVYLQMNSLKPEDTAVYYCATDGYYYCSDYPHPLYWGQGTQVTVSSAAAYPYDVPDYGSHHHHHH

SEQ ID NO: 895 - protein, 142 aa, synthetic construct
  REGION 1..142: note = Synthetic Sequence
QVQLQESGGGLVQPGGSLRLSCAASGFTFTAYAMSWFRQAPGKEREEVSCINSSDGSTYYADSVKGRFTISRDNAKNTVYLQMNSLKPEDTAVYHCATDGWRDCTWSNEYAYWGQGTQVTVSSAAAYPYDVPDYGSHHHHHH

SEQ ID NO: 896 - protein, 142 aa, synthetic construct
  REGION 1..142: note = Synthetic Sequence
QVQLQESGGGLVQPGGSLRLSCAASGFTFDYYAIGWFRQAPGKEREEVSCISGSDSSTYYADSVKGRFTIVRDNAQNTVYLQMNSLKPEDTAIYYCAVTGWRTCRGLNEYDYWGQGTQVTVSSAAAYPYDVPDYGSHHHHHH

SEQ ID NO: 897 - protein, 142 aa, synthetic construct
  REGION 1..142: note = Synthetic Sequence
QVQLQESGGGLVQPGGSLRLSCAASGFNLDPYAIAWFRQAPGKEREEVSCISSSDVGTYYADSVKGRFTISRDNTKKTVYLQMNSLKPEDTAVYYCATDGYYYCSDYPHPLYWGQGTQVTVSSAAAYPYDVPDYGSHHHHHH

SEQ ID NO: 898 - protein, 134 aa, synthetic construct
  REGION 1..134: note = Synthetic Sequence
QVQLQESGGGLVQAGESLRLSCTASGTIFSINRMDWFRQAPGKQRELVALITSDGTPTYADSAKGRFTISRDNTKKTVSLQMNSLKPEDTAVYYCHVSSGVYNYWGQGTQVTVSSAAAYPYDVPDYGSHHHHHH

SEQ ID NO: 899 - protein, 134 aa, synthetic construct
  REGION 1..134: note = Synthetic Sequence
QVQLQESGGGLVQAGGSLRLSCTASGTIFSINRMDWFRQAPGKQRELVALITSDGTPAYADSAKGRFTISRDNTKKTVSLQMNSLKPEDTAVYYCHVSSGVYNYWGQGTQVTVSSAAAYPYDVPDYGSHHHHHH

SEQ ID NO: 900 - protein, 140 aa, synthetic construct
  REGION 1..140: note = Synthetic Sequence
QVQLQESGGGLVQSGGSLRLSCKTSGFTFSSYGMSWVRQTPGKGPEWVSAIDSGGGSTSYADSVKGRFTISRDNAKNTLYLQMNSLKPEDTAVYYCAQGYYCSGYGCSDYWGQGTQVTVSSAAAYPYDVPDYGSHHHHHH

SEQ ID NO: 901 - protein, 142 aa, synthetic construct
  REGION 1..142: note = Synthetic Sequence
QVQLQESGGGLVQPGGSLRLSCAASGFNLDPYAIGWFRQAPGKEREEVSCISSGDGSKYYADSVKGRFTMSRDNAKKTVYLQMNSLKPEDTAVYYCATDGYYYCSDYPHPLYWGQGTQVTVSSAAAYPYDVPDYGSHHHHHH

SEQ ID NO: 902 - protein, 142 aa, synthetic construct
  REGION 1..142: note = Synthetic Sequence
QVQLQESGGGLVQPGGSLRLSCAVSGFNLDPYAIAWFRQAPGKEREEVSCISSSDVGTYYADSVKGRFTISRDNAKKTVYLQMNSLKPEDTAVYYCATDGYYYCSDYPHPLYWGQGTQVTVSSAAAYPYDVPDYGSHHHHHH

SEQ ID NO: 903 - protein, 139 aa, synthetic construct
  REGION 1..139: note = Synthetic Sequence
QVQLQESGGGLVQAGGSLRLSCAASESIFSIEAMGWYRQAPGKQRELVAAIFGGGFTNYADSVKGRFTISRDNANRTVYLQMNSLKPEDTAVYYCNADLVSGSSRLYDYWGQGTQVTVSSAAAYPYDVPDYGSHHHHHH

SEQ ID NO: 904 - protein, 133 aa, synthetic construct
  REGION 1..133: note = Synthetic Sequence
QVQLQESGGGLVQAGGSLRLSCAASGKIFSGNDMGWYRQAPGKQRELVGIITSGGITDYADAVKGRFTISRDNAKNMMYLQMNSLKPEDTAVYYCNMRDRTIWWGQGTQVTVSSAAAYPYDVPDYGSHHHHHH

SEQ ID NO: 905 - protein, 143 aa, synthetic construct
  REGION 1..143: note = Synthetic Sequence
QVQLQESGGGLVQPGGSLRLSCAASGFTLDYYAIGWFRQAPGKEREEVSCISSSDGSTYYADSVKGRFTISRDNAKNTVNLQMNSLKPEDTAVYYCATDGWSSCRHGINEYLYWGQGTQVTVSSAAAYPYDVPDYGSHHHHHH

SEQ ID NO: 906 - protein, 140 aa, synthetic construct
  REGION 1..140: note = Synthetic Sequence
QVQLQESGGGLVQAGGSLRLSCAASGFTFSSYGMSWVRQTPGKGPEWVSAIDSGGGSTSYADSVKGRFTISRDNAKNTLYLQMNSLKPEDTAVYYCAQGYYCSGYGCSDYWGQGTQVTVSSAAAYPYDVPDYGSHHHHHH

SEQ ID NO: 907 - protein, 134 aa, synthetic construct
  REGION 1..134: note = Synthetic Sequence
QVQLQESGGGLVQPGGSLRLSCTASGTIFSINRMDWFRQAPGKQRELVALITSDGTPTYADSAKGRFTISRDNTKKTVSLQMNSLKPEDTAVYYCHVSSGVYNYWGQGTQVTVSSAAAYPYDVPDYGSHHHHHH

SEQ ID NO: 908 - protein, 140 aa, synthetic construct
  REGION 1..140: note = Synthetic Sequence
QVQLQESGGGLVQPGGSLRLSCAASGFTFSSYGMSWVRQTPGKGPEWVSAIDSGGGSTSYADSVKGRFTISRDNAKNTLYLQMNSLKPEDTAVYYCAQGYYCSGYGCSDYWGQGTQVTVSSAAAYPYDVPDYGSHHHHHH

SEQ ID NO: 909 - protein, 142 aa, synthetic construct
  REGION 1..142: note = Synthetic Sequence
QVQLQESGGGLVQPGGSLRLSCAASGFNLDPYAIAWFRQAPGKEREEVSCISSSDVGTYYADSVKGRFTISRDNAKKTVYLQMNSLKPEDTAVYYCATDGYYYCSDYPHPLYWGQGTQVTVSSAAAYPYDVPDYGSHHHHHH

SEQ ID NO: 910 - protein, 145 aa, synthetic construct
  REGION 1..145: note = Synthetic Sequence
  SITE 13: note = misc_feature - Xaa can be any naturally occurring amino acid
QVQLQESGGGLVXAGGSLRLSCAASGRTFSISAMGWFRQAPGKEREFVAAITWSGGSTSYTDSVKGRFTISRDNAKNTLYLQMNSLKPEDTAIYYCAAMGRTNYGVIYDPNMYNYWGQGTQVTVSSAAAYPYDVPDYGSHHHHHH

SEQ ID NO: 911 - protein, 144 aa, synthetic construct
  REGION 1..144: note = Synthetic Sequence
QVQLQESGGGLVQPGGSLRLSCAASGFTLDYYAINWFRQAPGKEREEVSCISSSDGSTYYADSVKGRFTISRDNAKNTVYLQMNSLKPEDTAVYYCATSGWRLCRPTDEYDYLYWGQGTQVTVSSAAAYPYDVPDYGSHHHHHH

SEQ ID NO: 912 - protein, 140 aa, synthetic construct
  REGION 1..140: note = Synthetic Sequence
QVQLQESGGGLVQAGGSMRLSCAASGFTFSSYGMSWVRQTPGKGPEWVSAIDSGGGSTSYADSVKGRFTISRDNAKNTLYLQMNSLKPEDTAVYYCAQGYYCSGYGCSDYWGQGTQVTVSSAAAYPYDVPDYGSHHHHHH

SEQ ID NO: 913 - protein, 138 aa, synthetic construct
  REGION 1..138: note = Synthetic Sequence
QVQLQESGGGTVQAGGSLRLSCAASGFTFNDYAMSWVRQAPGKGLEWVSGIRSNGGYTNYADSVKGRFTISRDNAKNTLYLQMNSLKSEDTAVYYCAQGYYCSGYGCYPGQGTQVTVSSAAAYPYDVPDYGSHHHHHH

SEQ ID NO: 914 - protein, 143 aa, synthetic construct
  REGION 1..143: note = Synthetic Sequence
QVQLQESGGGLVQPGTSLRLSCAASGFTLDYYAIGWFRQAPGKEREEVSCISSSDGSTYYADSVKGRFTISRDNAKNTVNLQMNSLKPEDTAVYYCATDGWSSCRHGINEYLYWGQGTQVTVSSAAAYPYDVPDYGSHHHHHH

SEQ ID NO: 915 - protein, 451 aa, synthetic construct
  REGION 1..451: note = Synthetic Sequence
EVQLVESGGGLVQPGGSLRLSCAASGFTFSRYWMSWVRQAPGKGLEWVANIKQDGSEKYYVDSVKGRFTISRDNAKNSLYLQMNSLRAEDTAVYYCAREGGWFGELAFDYWGQGTLVTVSSASTKGPSVFPLAPSSKSTSGGTAALGCLVKDYFPEPVTVSWNSGALTSGVHTFPAVLQSSGLYSLSSVVTVPSSSLGTQTYICNVNHKPSNTKVDKRVEPKSCDKTHTCPPCPAPEFEGGPSVFLFPPKPKDTLMISRTPEVTCVVVDVSHEDPEVKFNWYVDGVEVHNAKTKPREEQYNSTYRVVSVLTVLHQDWLNGKEYKCKVSNKALPASIEKTISKAKGQPREPQVYTLPPSREEMTKNQVSLTCLVKGFYPSDIAVEWESNGQPENNYKTTPPVLDSDGSFFLYSKLTVDKSRWQQGNVFSCSVMHEALHNHYTQKSLSLSPGK

SEQ ID NO: 916 - protein, 215 aa, synthetic construct
  REGION 1..215: note = Synthetic Sequence
EIVLTQSPGTLSLSPGERATLSCRASQRVSSSYLAWYQQKPGQAPRLLIYDASSRATGIPDRFSGSGSGTDFTLTISRLEPEDFAVYYCQQYGSLPWTFGQGTKVEIKRTVAAPSVFIFPPSDEQLKSGTASVVCLLNNFYPREAKVQWKVDNALQSGNSQESVTEQDSKDSTYSLSSTLTLSKADYEKHKVYACEVTHQGLSSPVTKSFNRGEC

SEQ ID NO: 917 - protein, 121 aa, synthetic construct
  REGION 1..121: note = Synthetic Sequence
EVQLVESGGGLVQPGGSLRLSCAASGFTFSRYWMSWVRQAPGKGLEWVANIKQDGSEKYYVDSVKGRFTISRDNAKNSLYLQMNSLRAEDTAVYYCAREGGWFGELAFDYWGQGTLVTVSS

SEQ ID NO: 918 - protein, 108 aa, synthetic construct
  REGION 1..108: note = Synthetic Sequence
EIVLTQSPGTLSLSPGERATLSCRASQRVSSSYLAWYQQKPGQAPRLLIYDASSRATGIPDRFSGSGSGTDFTLTISRLEPEDFAVYYCQQYGSLPWTFGQGTKVEIK

SEQ ID NO: 919 - protein, 448 aa, synthetic construct
  REGION 1..448: note = Synthetic Sequence
EVQLVESGGGLVQPGGSLRLSCAASGFTFSDSWIHWVRQAPGKGLEWVAWISPYGGSTYYADSVKGRFTISADTSKNTAYLQMNSLRAEDTAVYYCARRHWPGGFDYWGQGTLVTVSSASTKGPSVFPLAPSSKSTSGGTAALGCLVKDYFPEPVTVSWNSGALTSGVHTFPAVLQSSGLYSLSSVVTVPSSSLGTQTYICNVNHKPSNTKVDKKVEPKSCDKTHTCPPCPAPELLGGPSVFLFPPKPKDTLMISRTPEVTCVVVDVSHEDPEVKFNWYVDGVEVHNAKTKPREEQYASTYRVVSVLTVLHQDWLNGKEYKCKVSNKALPAPIEKTISKAKGQPREPQVYTLPPSREEMTKNQVSLTCLVKGFYPSDIAVEWESNGQPENNYKTTPPVLDSDGSFFLYSKLTVDKSRWQQGNVFSCSVMHEALHNHYTQKSLSLSPGK

SEQ ID NO: 920 - protein, 214 aa, synthetic construct
  REGION 1..214: note = Synthetic Sequence
DIQMTQSPSSLSASVGDRVTITCRASQDVSTAVAWYQQKPGKAPKLLIYSASFLYSGVPSRFSGSGSGTDFTLTISSLQPEDFATYYCQQYLYHPATFGQGTKVEIKRTVAAPSVFIFPPSDEQLKSGTASVVCLLNNFYPREAKVQWKVDNALQSGNSQESVTEQDSKDSTYSLSSTLTLSKADYEKHKVYACEVTHQGLSSPVTKSFNRGEC

SEQ ID NO: 921 - protein, 450 aa, synthetic construct
  REGION 1..450: note = Synthetic Sequence
EVQLLESGGGLVQPGGSLRLSCAASGFTFSSYIMMWVRQAPGKGLEWVSSIYPSGGITFYADTVKGRFTISRDNSKNTLYLQMNSLRAEDTAVYYCARIKLGTVTTVDYWGQGTLVTVSSASTKGPSVFPLAPSSKSTSGGTAALGCLVKDYFPEPVTVSWNSGALTSGVHTFPAVLQSSGLYSLSSVVTVPSSSLGTQTYICNVNHKPSNTKVDKKVEPKSCDKTHTCPPCPAPELLGGPSVFLFPPKPKDTLMISRTPEVTCVVVDVSHEDPEVKFNWYVDGVEVHNAKTKPREEQYNSTYRVVSVLTVLHQDWLNGKEYKCKVSNKALPAPIEKTISKAKGQPREPQVYTLPPSRDELTKNQVSLTCLVKGFYPSDIAVEWESNGQPENNYKTTPPVLDSDGSFFLYSKLTVDKSRWQQGNVFSCSVMHEALHNHYTQKSLSLSPGK

SEQ ID NO: 922 - protein, 216 aa, synthetic construct
  REGION 1..216: note = Synthetic Sequence
QSALTQPASVSGSPGQSITISCTGTSSDVGGYNYVSWYQQHPGKAPKLMIYDVSNRPSGVSNRFSGSKSGNTASLTISGLQAEDEADYYCSSYTSSSTRVFGTGTKVTVLGQPKANPTVTLFPPSSEELQANKATLVCLISDFYPGAVTVAWKADGSPVKAGVETTKPSKQSNNKYAASSYLSLTPEQWKSHRSYSCQVTHEGSTVEKTVAPTECS

SEQ ID NO: 923 - protein, 123 aa, synthetic construct
  REGION 1..123: note = Synthetic Sequence
QVQLVQSGAEVKKPGSSVKVSCKTSGDTFSTYAISWVRQAPGQGLEWMGGIIPIFGKAHYAQKFQGRVTITADESTSTAYMELSSLRSEDTAVYFCARKFHFVSGSPFGMDVWGQGTTVTVSS

SEQ ID NO: 924 - protein, 106 aa, synthetic construct
  REGION 1..106: note = Synthetic Sequence
EIVLTQSPATLSLSPGERATLSCRASQSVSSYLAWYQQKPGQAPRLLIYDASNRATGIPARFSGSGSGTDFTLTISSLEPEDFAVYYCQQRSNWPTFGQGTKVEIK

SEQ ID NO: 925 - protein, 117 aa, synthetic construct
  REGION 1..117: note = Synthetic Sequence
QVQLVQSGAEVKKPGASVKVSCKASGYTFTDYGFSWVRQAPGQGLEWMGWITAYNGNTNYAQKLQGRVTMTTDTSTSTVYMELRSLRSDDTAVYYCARDYFYGMDVWGQGTTVTVSS

SEQ ID NO: 926 - protein, 107 aa, synthetic construct
  REGION 1..107: note = Synthetic Sequence
EIVLTQSPATLSLSPGERATLSCRASQSVSSYLVWYQQKPGQAPRLLIYDASNRATGIPARFSGSGSGTDFTLTISSLEPEDFAVYYCQQRSNWPRTFGQGTKVEIK

SEQ ID NO: 927 - protein, 118 aa, synthetic construct
  REGION 1..118: note = Synthetic Sequence
QVQLVQSGAEVKKPGASVKVSCKASGYTFTSYDVHWVRQAPGQRLEWMGWLHADTGITKFSQKFQGRVTITRDTSASTAYMELSSLRSEDTAVYYCARERIQLWFDYWGQGTLVTVSS

SEQ ID NO: 928 - protein, 107 aa, synthetic construct
  REGION 1..107: note = Synthetic Sequence
DIQMTQSPSSLSASVGDRVTITCRASQGISSWLAWYQQKPEKAPKSLIYAASSLQSGVPSRFSGSGSGTDFTLTISSLQPEDFATYYCQQYNSYPYTFGQGTKLEIK

SEQ ID NO: 929 - protein, 120 aa, synthetic construct
  REGION 1..120: note = Synthetic Sequence
QVQLVQSGAEVKKPGSSVKVSCKVSGGIFSTYAINWVRQAPGQGLEWMGGIIPIFGTANHAQKFQGRVTITADESTSTAYMELSSLRSEDTAVYYCARDQGIAAALFDYWGQGTLVTVSS

SEQ ID NO: 930 - protein, 108 aa, synthetic construct
  REGION 1..108: note = Synthetic Sequence
EIVLTQSPGTLSLSPGERATLSCRASQSVSSSYLAWYQQKPGQAPRLLIYGASSRATGIPDRFSGSGSGTDFTLTISRLEPEDFAVYYCQQYGSSPWTFGQGTKVEIK

SEQ ID NO: 931 - protein, 113 aa, synthetic construct
  REGION 1..113: note = Synthetic Sequence
EVQLVESGGGLVQPGRSLRLSCAVSGFTFDDYVVHWVRQAPGKGLEWVSGISGNSGNIGYADSVKGRFTISRDNAKNSLYLQMNSLRAEDTALYYCAVPFDYWGQGTLVTVSS

SEQ ID NO: 932 - protein, 107 aa, synthetic construct; identical to SEQ ID NO: 928
  REGION 1..107: note = Synthetic Sequence

SEQ ID NO: 933 - protein, 123 aa, synthetic construct
  REGION 1..123: note = Synthetic Sequence
QVQLVQSGAEVKKPGSSVKVSCKTSGDTFSSYAISWVRQAPGQGLEWMGGIIPIFGRAHYAQKFQGRVTITADESTSTAYMELSSLRSEDTAVYFCARKFHFVSGSPFGMDVWGQGTTVTVSS

SEQ ID NO: 934 - protein, 106 aa, synthetic construct; identical to SEQ ID NO: 924
  REGION 1..106: note = Synthetic Sequence

SEQ ID NO: 935 - protein, 123 aa, synthetic construct
  REGION 1..123: note = Synthetic Sequence
QVQLVQSGAEVKKPGSSVKVSCKTSGGTFSSYAISWVRQAPGQGLEWMGGIIPIFGKAHYAQKFQGRVTITADESTTTAYMELSSLRSEDTAVYYCARKYDYVSGSPFGMDVWGQGTTVTVSS

SEQ ID NO: 936 - protein, 106 aa, synthetic construct; identical to SEQ ID NO: 924
  REGION 1..106: note = Synthetic Sequence

SEQ ID NO: 937 - protein, 121 aa, synthetic construct
  REGION 1..121: note = Synthetic Sequence
QVQLVQSGAEVKKPGSSVKVSCKASGGTFSSYAINWVRQAPGQGLEWMGGIIPIFGSANYAQKFQDRVTITADESTSAAYMELSSLRSEDTAVYYCARDSSGWSRYYMDVWGQGTTVTVSS

SEQ ID NO: 938 - protein, 106 aa, synthetic construct
  REGION 1..106: note = Synthetic Sequence
EIVLTQSPGTLSLSPGERATLSCRASQSVSSSYLAWYQQKPGQAPRLLIYGASSRATGIPDRFSGSGSGTDFTLTISRLEPEDFAVYYCQQYGSSPFGGGTKVEIK

SEQ ID NO: 939 - protein, 123 aa, synthetic construct
  REGION 1..123: note = Synthetic Sequence
QVQLVQSGAEVKEPGSSVKVSCKASGGTFNSYAISWVRQAPGQGLEWMGGIIPLFGIAHYAQKFQGRVTITADESTNTAYMDLSSLRSEDTAVYYCARKYSYVSGSPFGMDVWGQGTTVTVSS

SEQ ID NO: 940 - protein, 106 aa, synthetic construct
  REGION 1..106: note = Synthetic Sequence
EIVLTQSPATLSLSPGERATLSCRASQSVSSYLAWYQQKPGQAPRLLIYDASNRATGIPARFSGSGSGTDFTLTISSLEPEDFAVYYCQQRSNWPTFGQGTRLEIK

SEQ ID NO: 941 - protein, 121 aa, synthetic construct
  REGION 1..121: note = Synthetic Sequence
EVQLVESGGGLVQPGRSLRLSCAASGITFDDYGMHWVRQAPGKGLEWVSGISWNRGRIEYADSVKGRFTISRDNAKNSLYLQMNSLRAEDTALYYCAKGRFRYFDWFLDYWGQGTLVTVSS

SEQ ID NO: 942 - protein, 107 aa, synthetic construct
  REGION 1..107: note = Synthetic Sequence
AIQLTQSPSSLSASVGDRVTITCRASQGISSALAWYQQKPGKAPKLLIYDASSLESGVPSRFSGSGSGTDFTLTISSLQPEDFATYYCQQFNSYPFTFGPGTKVDIK

SEQ ID NO: 943 - protein, 118 aa, synthetic construct
  REGION 1..118: note = Synthetic Sequence
EVKLQESGPSLVKPSQTLSLTCSVTGYSITSDYWNWIRKFPGNKLEYVGYISYTGSTYYNPSLKSRISITRDTSKNQYYLQLNSVTSEDTATYYCARYGGWLSPFDYWGQGTTLTVSS

SEQ ID NO: 944 - protein, 107 aa, synthetic construct
  REGION 1..107: note = Synthetic Sequence
DIVMTQSHKLMSTSVGDRVSITCKASQDVGTAVAWYQQKPGQSPKLLIYWASTRHTGVPDRFTGSGSGTDFTLTISNVQSEDLADYFCQQDSSYPLTFGAGTKVELK

SEQ ID NO: 945 - protein, 120 aa, synthetic construct
  REGION 1..120: note = Synthetic Sequence
EVQLQESGPGLVAPSQSLSITCTVSGFSLTTYSINWIRQPPGKGLEWLGVMWAGGGTNSNSVLKSRLIISKDNSKSQVFLKMNSLQTDDTARYYCARYYGNSPYYAIDYWGQGTSVTVSS

SEQ ID NO: 946 - protein, 107 aa, synthetic construct
  REGION 1..107: note = Synthetic Sequence
DIVTTQSHKLMSTSVGDRVSITCKASQDVGTAVAWYQQKPGQSPKLLIYWASTRHTGVPDRFTGSGSGTDFTLTISNVQSEDLADYFCQQDSSYPLTFGAGTKVELK

SEQ ID NO: 947 - protein, 118 aa, synthetic construct
  REGION 1..118: note = Synthetic Sequence
EVKLQESGPSLVKPSQTLSLTCSVTGYSIISDYWNWIRKFPGNKLEYLGYISYTGSTYYNPSLKSRISITRDTSKNQYYLQLNSVTTEDTATYYCARRGGWLLPFDYWGQGTTLTVSS

SEQ ID NO: 948 - protein, 113 aa, synthetic construct
  REGION 1..113: note = Synthetic Sequence
DIVMTQSPSSLAVSVGEKVSMGCKSSQSLLYSSNQKNSLAWYQQKPGQSPKLLIDWASTRESGVPDRFTGSGSGTDFTLTISSVKAEDLAVYYCQQYYGYPLTFGAGTKLELK

SEQ ID NO: 949 - protein, 118 aa, synthetic construct
  REGION 1..118: note = Synthetic Sequence
EVKLQESGPSLVKPGASVKLSCKASGYTFTSYDINWVKQRPGQGLEWIGWIFPRDNNTKYNENFKGKATLTVDTSSTTAYMELHSLTSEDSAVYFCTKENWVGDFDYWGQGTTLTLSS

SEQ ID NO: 950 - protein, 106 aa, synthetic construct
  REGION 1..106: note = Synthetic Sequence
DIVMTQSPAIMSASPGEKVTMTCSASSSIRYMHWYQQKPGTSPKRWISDTSKLTSGVPARFSGSGSGTSYALTISSMEAEDAATYYCHQRSSYPWTFGGGTKLEIK

SEQ ID NO: 951 - protein, 114 aa, synthetic construct
  REGION 1..114: note = Synthetic Sequence
EVQLQQSGPDLVTPGASVRISCQASGYTFPDYYMNWVKQSHGKSLEWIGDIDPNYGGTTYNQKFKGKAILTVDRSSSTAYMELRSLTSEDSAVYYCARGALTDWGQGTSLTVSS

SEQ ID NO: 952 - protein, 106 aa, synthetic construct
  REGION 1..106: note = Synthetic Sequence
QIVLSQSPAILSASPGEKVTMTCRASSSVSYIYWFQQKPGSSPKPWIYATFNLASGVPARFSGSGSGTSYSLTISRVETEDAATYYCQQWSNNPLTFGAGTKLELK

SEQ ID NO: 953 - protein, 115 aa, synthetic construct
  REGION 1..115: note = Synthetic Sequence
EVQLVQSGPELKKPGASVKMSCKASGYTFTSYVMHWVKQAPGQRLEWIGYVNPFNDGTKYNEMFKGRATLTSDKSTSTAYMELSSLRSEDSAVYYCARQAWGYPWGQGTLVTVSS

SEQ ID NO: 954 - protein, 115 aa, synthetic construct
  REGION 1..115: note = Synthetic Sequence
EVQLVQSGAEVKKPGASVKMSCKASGYTFTSYVMHWVKQAPGQRLEWIGYVNPFNDGTKYNEMFKGRATLTSDKSTSTAYMELSSLRSEDTAVYYCARQAWGYPWGQGTLVTVSS

SEQ ID NO: 955 - protein, 115 aa, synthetic construct
  REGION 1..115: note = Synthetic Sequence
EVQLVQSGAEVKKPGASVKMSCKASGYTFTSYVMHWVRQAPGQRLEWIGYVNPFNDGTKYNEMFKGRATLTSDKSTSTAYMELSSLRSEDTAVYYCARQAWGYPWGQGTLVTVSS

SEQ ID NO: 956 - protein, 115 aa, synthetic construct
  REGION 1..115: note = Synthetic Sequence
EVQLVQSGAEVKKPGASVKVSCKASGYTFTSYVMHWVRQAPGQRLEWIGYVNPFNDGTKYNEMFKGRATLTSDKSTSTAYMELSSLRSEDTAVYYCARQAWGYPWGQGTLVTVSS

SEQ ID NO: 957 - protein, 115 aa, synthetic construct
  REGION 1..115: note = Synthetic Sequence
EVQLVQSGAEVKKPGASVKVSCKASGYTFTSYVMHWVRQAPGQRLEWIGYVNPFNDGTKYNEMFKGRATITSDKSTSTAYMELSSLRSEDTAVYYCARQAWGYPWGQGTLVTVSS

SEQ ID NO: 958 - protein, 111 aa, synthetic construct
  REGION 1..111: note = Synthetic Sequence
DIVLTQSPASLALSPGERATLSCRATESVEYYGTSLVQWYQQKPGQPPKLLIYAASSVDSGVPSRFSGSGSGTDFTLTINSLEEEDAAMYFCQQSRRVPYTFGQGTKLEIK

SEQ ID NO: 959 - protein, 111 aa, synthetic construct
  REGION 1..111: note = Synthetic Sequence
DIVLTQSPATLSLSPGERATLSCRATESVEYYGTSLVQWYQQKPGQPPKLLIYAASSVDSGVPSRFSGSGSGTDFTLTINSLEAEDAAMYFCQQSRRVPYTFGQGTKLEIK

SEQ ID NO: 960 - protein, 111 aa, synthetic construct
  REGION 1..111: note = Synthetic Sequence
EIVLTQSPATLSLSPGERATLSCRATESVEYYGTSLVQWYQQKPGQPPKLLIYAASSVDSGVPSRFSGSGSGTDFTLTINSLEAEDAAMYFCQQSRRVPYTFGQGTKLEIK

SEQ ID NO: 961 - protein, 111 aa, synthetic construct
  REGION 1..111: note = Synthetic Sequence
DIVLTQSPATLSLSPGERATLSCRATESVEYYGTSLVQWYQQKPGQPPKLLIYAASSVDSGVPSRFSGSGSGTDFTLTINSLEAEDAATYFCQQSRRVPYTFGQGTKLEIK

SEQ ID NO: 962 - protein, 120 aa, synthetic construct
  REGION 1..120: note = Synthetic Sequence
EVQLVESGGGLVKPGGSLRLSCAASGFTFSTYSMNWVRQAPGKGLEWVSSISSSGDYIYYADSVKGRFTISRDNAKNSLFLQMNSLKAEDTAVYYCARDLVTSMVAFDYWGQGTLVTVSS

SEQ ID NO: 963 - protein, 108 aa, synthetic construct
  REGION 1..108: note = Synthetic Sequence
SYELTQPPSVSVSPGQAARITCSGDALPQKYVFWYQQKSGQAPVLVIYEDSKRPSGIPERFSGSSSGTMATLTISGAQVEDEADYYCYSTDRSGNHRVFGGGTRLTVL

SEQ ID NO: 964 - protein, 120 aa, synthetic construct
  REGION 1..120: note = Synthetic Sequence
EVQLVESGGGLVQPGGSLRLSCAASGFTFSSYWMSWVRQAPGKGLEWVANIKQDGGEQYYVDSVKGRFTISRDNAKNSLYLQMNSLRAEDTAVYYCARDWNYGYYDMDVWGQGTTVTVSS

SEQ ID NO: 965 - protein, 108 aa, synthetic construct
  REGION 1..108: note = Synthetic Sequence
EIVLTQSPGTLSLSPGERATLSCRASQSVSSNYLAWFQQKPGQAPRLLIFGTSSRATGIPDRFSGSGSGTDFTLTISRLEPEDFAVYYCQQYGSSIFTFGPGTKVDIK

SEQ ID NO: 966 - protein, 121 aa, synthetic construct; identical to SEQ ID NO: 917
  REGION 1..121: note = Synthetic Sequence

SEQ ID NO: 967 - protein, 108 aa, synthetic construct
  REGION 1..108: note = Synthetic Sequence
EIVLTQSPGTLSLSPGERATLSCRASQRVSSSYLAWYQQKPGQAPRLLIYDASSRATGIPDRFSGSGSGTDFTLTISRLEPEDFAVYYCQQYGSLPWTFGQGTEVEIK

SEQ ID NO: 968 - protein, 121 aa, synthetic construct
  REGION 1..121: note = Synthetic Sequence
EVQLLESGGGLVQPGGSLRLSCAASGFTFSNYAMSWVRQAPGKGLEWVSAIRGSGGSTYYADSVKGRFTISRDNSKNTLYLQMNSLRAEDTAVYYCAKDLHYDSSGYLDYWGQGTLVTVSS

SEQ ID NO: 969 - protein, 107 aa, synthetic construct
  REGION 1..107: note = Synthetic Sequence
DIQMTQSPSSVSASVGDRVTITCRASQGIRSWLAWYQQKPGKAPKLLIYAISRLQSGVPSRFSGSGSGTDFTLTISSLQPEDFATYYCQQANSFPLTFGGGTKVEIK

SEQ ID NO: 970 - protein, 119 aa, synthetic construct
  REGION 1..119: note = Synthetic Sequence
EVQLVESGGGLVQPGGSLRLSCAASGFTFSSYWMSWVRQAPGKGLEWVANIKQDGGEKYYVDSVKGRFTISRDNAKNSLFLQMNSLRAEDTAVYYCARVQLYSDYFDYWGQGTLVTVSS

SEQ ID NO: 971 - protein, 107 aa, synthetic construct
  REGION 1..107: note = Synthetic Sequence
DIQMTQSPSSVSASVGDRVTITCRASQGISSWLAWYQQKSGKAPKLLIYAASGLQSGVPSRFSGSGSGTDFTLTISSLQPEDLATYYCQQSHSLPPTFGQGTKVEIK

SEQ ID NO: 972 - protein, 121 aa, synthetic construct
  REGION 1..121: note = Synthetic Sequence
EVQLLESGGDLVQPGGSLRLSCAASGFTFNSYAMSWVRQAPGKGLEWVSTISGSGGFTFSADSVKGRFTISRDNSKNTLFLQMNSLRVEDSAVYSCAKVLVGFNNGCWDYWGQGTLVTVSS

SEQ ID NO: 973 - protein, 108 aa, synthetic construct
  REGION 1..108: note = Synthetic Sequence
SYVLTQPPSVSVAPGQTARITCGGNNIGSKSVHWYQQKPGQAPVLVVYDDSDRPSGIPERFSGSNSGNTATLTISRVEAGDEADYYCQVWDSSNDHVVFGGGTKLTVL

SEQ ID NO: 974 - protein, 120 aa, synthetic construct
  REGION 1..120: note = Synthetic Sequence
EVQLVESGGGLVKPGGSLRLSCAASGFTFSTYSMNWVRQAPGKGLEWVSSISSSGDYIYYADSVKGRFTISRDNAKNSLYLQMNSLRAEDTAVYYCARDLVTSMVAFDYWGQGTLVTVSS

SEQ ID NO: 975 - protein, 108 aa, synthetic construct
  REGION 1..108: note = Synthetic Sequence
SYELTQPPSVSVSPGQTARITCSGDALPQKYVFWYQQKSGQAPVLVIYEDSKRPSGIPERFSGSSSGTMATLTISGAQVEDEADYYCYSTDRSGNHRVFGGGTKLTVL

SEQ ID NO: 976 - protein, 121 aa, synthetic construct; identical to SEQ ID NO: 917
  REGION 1..121: note = Synthetic Sequence

SEQ ID NO: 977 - protein, 108 aa, synthetic construct; identical to SEQ ID NO: 918
  REGION 1..108: note = Synthetic Sequence

SEQ ID NO: 978 - protein, 120 aa, synthetic construct
  REGION 1..120: note = Synthetic Sequence
QVQLVQSGAEVKKPGASVKVSCKASGYTFTSYWMYWVRQATGQGLEWMGRIDPNSGSTKYNEKFKNRFTISRDDSKNTAYLQMNSLKTEDTAVYYCARDYRKGLYAMDYWGQGTTVTVSS

SEQ ID NO: 979 - protein, 120 aa, synthetic construct
  REGION 1..120: note = Synthetic Sequence
EVQLVQSGAEVKKPGATVKISCKVSGYTFTSYWMYWVRQATGQGLEWMGRIDPNSGSTKYNEKFKNRVTITADKSTSTAYMELSSLRSEDTAVYYCARDYRKGLYAMDYWGQGTTVTVSS

SEQ ID NO: 980 - protein, 120 aa, synthetic construct
  REGION 1..120: note = Synthetic Sequence
EVQLVQSGAEVKKPGESLRISCKGSGYTFTSYWMYWVRQAPGQGLEWMGRIDPNSGSTKYNEKFKNRVTISVDTSKNQFSLKLSSVTAADTAVYYCARDYRKGLYAMDYWGQGTTVTVSS

SEQ ID NO: 981 - protein, 120 aa, synthetic construct
  REGION 1..120: note = Synthetic Sequence
EVQLVQSGAEVKKPGATVKISCKVSGYTFTSYWMYWIRQSPSRGLEWLGRIDPNSGSTKYNEKFKNRLTISKDTSKNQVVLTMTNMDPVDTATYYCARDYRKGLYAMDYWGQGTTVTVSS

SEQ ID NO: 982 - protein, 120 aa, synthetic construct
  REGION 1..120: note = Synthetic Sequence
EVQLVQSGAEVKKPGESLRISCKGSGYTFTSYWMYWIRQPPGKGLEWIGRIDPNSGSTKYNEKFKNRVTITADKSTSTAYMELSSLRSEDTAVYYCARDYRKGLYAMDYWGQGTTVTVSS

SEQ ID NO: 983 - protein, 120 aa, synthetic construct
  REGION 1..120: note = Synthetic Sequence
QVQLVQSGAEVKKPGASVKVSCKASGYTFTSYWMYWIRQSPSRGLEWLGRIDPNSGSTKYNEKFKNRFTISRDDSKNTAYLQMNSLKTEDTAVYYCARDYRKGLYAMDYWGQGTTVTVSS

SEQ ID NO: 984 - protein, 120 aa, synthetic construct
  REGION 1..120: note = Synthetic Sequence
EVQLVQSGAEVKKPGESLRISCKGSGYTFTSYWMYWVRQARGQRLEWIGRIDPNSGSTKYNEKFKNRLTISKDTSKNQVVLTMTNMDPVDTATYYCARDYRKGLYAMDYWGQGTTVTVSS

SEQ ID NO: 985 - protein, 120 aa, synthetic construct
  REGION 1..120: note = Synthetic Sequence
QITLKESGPTLVKPTQTLTLTCTFSGYTFTSYWMYWVRQAPGKGLEWVSRIDPNSGSTKYNEKFKNRVTITADKSTSTAYMELSSLRSEDTAVYYCARDYRKGLYAMDYWGQGTTVTVSS

SEQ ID NO: 986 - protein, 120 aa, synthetic construct
  REGION 1..120: note = Synthetic Sequence
EVQLVQSGAEVKKPGATVKISCKVSGYTFTSYWMYWVRQARGQRLEWIGRIDPNSGSTKYNEKFKNRFTISRDNSKNTLYLQMNSLRAEDTAVYYCARDYRKGLYAMDYWGQGTTVTVSS

SEQ ID NO: 987 - protein, 107 aa, synthetic construct
  REGION 1..107: note = Synthetic Sequence
DIVMTQTPLSLPVTPGEPASISCKASQDVGTAVAWYLQKPGQSPQLLIYWASTRHTGIPARFSGSGSGTEFTLTISSLQSEDFAVYYCQQYNSYPLTFGQGTKVEIK

SEQ ID NO: 988 - protein, 107 aa, synthetic construct
  REGION 1..107: note = Synthetic Sequence
DIQMTQSPSSLSASVGDRVTITCKASQDVGTAVAWYLQKPGQSPQLLIYWASTRHTGVPSRFSGSGSGTDFTLTISSLQPEDFATYYCQQYNSYPLTFGQGTKVEIK

SEQ ID NO: 989 - protein, 107 aa, synthetic construct
  REGION 1..107: note = Synthetic Sequence
EIVLTQSPDFQSVTPKEKVTITCKASQDVGTAVAWYLQKPGQSPQLLIYWASTRHTGVPDRFSGSGSGTDFTLKISRVEAEDVGVYYCQQYNSYPLTFGQGTKVEIK

SEQ ID NO: 990 - protein, 107 aa, synthetic construct
  REGION 1..107: note = Synthetic Sequence
EIVLTQSPDFQSVTPKEKVTITCKASQDVGTAVAWYLQKPGQSPQLLIYWASTRHTGVPSRFSGSGSGTDFTFTISSLQPEDIATYYCQQYNSYPLTFGQGTKVEIK

SEQ ID NO: 991 - protein, 107 aa, synthetic construct
  REGION 1..107: note = Synthetic Sequence
EIVLTQSPATLSLSPGERATLSCKASQDVGTAVAWYLQKPGQSPQLLIYWASTRHTGIPPRFSGSGYGTDFTLTINNIESEDAAYYFCQQYNSYPLTFGQGTKVEIK

SEQ ID NO: 992 - protein, 107 aa, synthetic construct
  REGION 1..107: note = Synthetic Sequence
DVVMTQSPLSLPVTLGQPASISCKASQDVGTAVAWYQQKPGQAPRLLIYWASTRHTGVPSRFSGSGSGTEFTLTISSLQPDDFATYYCQQYNSYPLTFGQGTKVEIK

SEQ ID NO: 993 - protein, 107 aa, synthetic construct
  REGION 1..107: note = Synthetic Sequence
DIQMTQSPSSLSASVGDRVTITCKASQDVGTAVAWYQQKPGQAPRLLIYWASTRHTGVPSRFSGSGSGTDFTFTISSLQPEDIATYYCQQYNSYPLTFGQGTKVEIK

SEQ ID NO: 994 - protein, 107 aa, synthetic construct
  REGION 1..107: note = Synthetic Sequence
AIQLTQSPSSLSASVGDRVTITCKASQDVGTAVAWYLQKPGQSPQLLIYWASTRHTGVPSRFSGSGSGTDFTFTISSLEAEDAATYYCQQYNSYPLTFGQGTKVEIK

SEQ ID NO: 995 - protein, 107 aa, synthetic construct
  REGION 1..107: note = Synthetic Sequence
EIVLTQSPDFQSVTPKEKVTITCKASQDVGTAVAWYQQKPGQAPRLLIYWASTRHTGVPSRFSGSGSGTEFTLTISSLQPDDFATYYCQQYNSYPLTFGQGTKVEIK

SEQ ID NO: 996 - protein, 116 aa, synthetic construct
  REGION 1..116: note = Synthetic Sequence
EVKLVESGGGLVKPGGSLKLSCAASGFIFRSYGMSWVRQTPEKRLEWVASISSGGSTYYPDSVKGRFTISRDNARNILYLQMSSLRSEDTAMYDCARGYDSGFAYWGQGTLVTVSE

SEQ ID NO: 997 - protein, 116 aa, synthetic construct
  REGION 1..116: note = Synthetic Sequence
EVKLVESGGGLVKPGGSLKLSCAASGFTFRSYGMSWVRQTPEKRLEWVASISSGGTTYYPDSVKGRFIISRDNARNILYLQMSSLRSEDTAMYYCAKGYDSGFAYWGQGTLVIVSA

SEQ ID NO: 998 - protein, 116 aa, synthetic construct
  REGION 1..116: note = Synthetic Sequence
QVQLKQSGPGLVQPSQSLSITCTVSGFSLTTYGVHWVRQSPGKGLEWLGVIWRGVTTDYNAAFMSRLTITKDNSKSQVFFKMNSLQANDTAIYYCARLGFYAMDYWGQGTSVTVSS

SEQ ID NO: 999 - protein, 116 aa, synthetic construct
  REGION 1..116: note = Synthetic Sequence
QVQLKQSGPGLVQPSQSLSITCTVSGFSLTSYGVHWVRQSPGKGLEWLGVIWSGGVTDYNAAFISRLSISKDNSKSQVFFKMNSLQANDTAIYYCARLGFYAMDYWGQGTSVTVSS

SEQ ID NO: 1000 - protein, 119 aa, synthetic construct
  REGION 1..119: note = Synthetic Sequence
EVKLFESGGGLVQPGGSLKLSCVASGFDFSTYWMHWVRQAPGQGLEWIGQINPDSTTINYAPSLKDRFIISRDNAKNTLFLQMSKVRSEDTALYYCAKPGDYGYDFDCWGQGTTLTVSS

SEQ ID NO: 1001 - protein, 119 aa, synthetic construct
  REGION 1..119: note = Synthetic Sequence
EVQLQESGPSLVKPSQTLSLTCSVTGDSITSGYWNWIRKFPGNKLEYMGYISYSGSTYYNPSLKSRISITRDTSKNQYYLQLNSVTTEDTATYYCARSLLWFSTGFAYWGQGTLVTVSA

SEQ ID NO: 1002 - protein, 116 aa, synthetic construct
  REGION 1..116: note = Synthetic Sequence
QVQLKQSGPGLVQPSQSLSITCTVSGFSLTSYGVHWVRQSPGKGLEWLGVIWSGGITDYNAAFKSRLSISKDNSKSQVFFKMNSLQANDTAIYFCARLGFYAMDYWGQGTSVTVSS

SEQ ID NO: 1003 - protein, 116 aa, synthetic construct
  REGION 1..116: note = Synthetic Sequence
EVKLVESGGGLVKPGGSLKLSCAASGFTFRSYGMSWARQIPEKRLEWVASISSGGTTYYLGSVQGRFTISRDNARNILYLQMSSLRSEDTAMYYCARGYDAGFAYWGQGTLVSVSE

SEQ ID NO: 1004 - protein, 117 aa, synthetic construct
  REGION 1..117: note = Synthetic Sequence
EVQLQESGPSLVKPSQTLSLTCSVTGDSITSGYWTWIRKFPGNKLEYMGYISYTGSTYYNPSLKSRISISRDTSKSQYYLQLNSVTTEDTATYYCARQRDWLGFAYWGQGTLVTVSA

SEQ ID NO: 1005 - protein, 116 aa, synthetic construct
  REGION 1..116: note = Synthetic Sequence
EEKLVESGGGLVKPGGSLKLSCAASGFSFSSYGMSWVRQTPEKRLEWVASISSGGSIYYPDSVKGRFTISRDNARNILYLQMSSLRSEDTAMYYCARGYDAGFAFWGQGTLVTASA

SEQ ID NO: 1006 - protein, 116 aa, synthetic construct
  REGION 1..116: note = Synthetic Sequence
QITLKESGPTLVKPTQTLTLTCTVSGFSLSTYGVHWIRQPPGKALEWLGVIWRGVTTDYNAAFMSRLTITKDNSKNQVVLTMNNMDPVDTATYYCARLGFYAMDYWGQGTLVTVSS

SEQ ID NO: 1007 - protein, 116 aa, synthetic construct
  REGION 1..116: note = Synthetic Sequence
EVQLVESGGGLVKPGGSLRLSCAASGFIFRSYGMSWVRQAPGKGLEWVASISSGGSTYYPDSVKGRFTISRDNAKNSLYLQMNSLRAEDTAVYDCARGYDSGFAYWGQGTLVTVSS

SEQ ID NO: 1008 - protein, 112 aa, synthetic construct
  REGION 1..112: note = Synthetic Sequence
DIVLTQSPASLAVSLGQRATISCRASQSVSTSSSSFMHWYQQKPGQPPKLLIKYASNLESGVPARFSGSGSGTDFTLNIHPVEEEDTATYYCQHSWEIPYTFGGGTKLEIKR

SEQ ID NO: 1009 - protein, 111 aa, synthetic construct
  REGION 1..111: note = Synthetic Sequence
DIVLTQSPPSLAVSLGQRATISCRASQSVSTSSSSYMHWYQQKPGQPPKLLIKYASNLESGVPARFSGSGSGTDFTLNIHPVEEEDTATYYCQHSWEIPYTFGGGTKLEIK

SEQ ID NO: 1010 - protein, 107 aa, synthetic construct
  REGION 1..107: note = Synthetic Sequence
SIVMTQTPKFLLVSAGDRVTITCKASQSVSNDVAWYQQKPGQSPKLLIYYAANRYTGVPDRFTGSGYGTDFTFTISIVQAEDLAVYFCQQDYTSPYTFGGGTKLEIK

SEQ ID NO: 1011 - protein, 107 aa, synthetic construct
  REGION 1..107: note = Synthetic Sequence
SIVMTQTPKFLLVSAGDRVTITCKASQSVSNDVGWYQQKPGQSPKLLIYYASNRYSGVPDRFTGSGYGTDFTFTISTVQAEDLAVYFCQQDYTSPYTFGGGTKLEIK

SEQ ID NO: 1012 - protein, 112 aa, synthetic construct
  REGION 1..112: note = Synthetic Sequence
DVLMTQTPLYLPVSLGDQASISCRSSQIIVHSNANTYLEWFLQKPGQSPKLLIYKVSNRFSGVPDRFSGSGSGTDFTLKISRVEAEDLGVYYCFQGSHVPYTFGGGTKLEIK

SEQ ID NO: 1013 - protein, 108 aa, synthetic construct
  REGION 1..108: note = Synthetic Sequence
QIVLTQSPAIMSASPGEKVTLTCSASSSVSSSYLYWNQQKPGSSPKVWIYNTSNLASGVPARFSGSGSGTSYSLTISSMEAEDAASYFCHQWRSYPPTLGAGTKLELK

SEQ ID NO: 1014 - protein, 106 aa, synthetic construct
  REGION 1..106: note = Synthetic Sequence
QIVLTQSPAIMSASPGEKVTMTCSANSSVSYMHWYQQKSGTSPKRWIYDTSKLASGVPARFSGSGSGTSYSLTISSMGAEDAATYYCQQWSSNPWTFGGGTKLEIK

SEQ ID NO: 1015 - protein, 111 aa, synthetic construct
  REGION 1..111: note = Synthetic Sequence
DIVLTQSPASLAVSLGQRATISCRASQSVSTSSYSYMHWYQQKPGQPPKLLIKYASNLESGVPARFSGSGSGTDFTLNIHPVEEEDTATYYCQNSWEIPYTFGGGTKLEIK

SEQ ID NO: 1016 - protein, 113 aa, synthetic construct
  REGION 1..113: note = Synthetic Sequence
DIVMTQTPSSLAVSLGEKVTMSCKSSQSLLYSSNQKNSLAWYQQKPGQSPKLLIYWASNRESGVPDRFTGSSSGTDFTLTISSVKAEDLAVYYCQQYYSYPLTFGAGTKLELK

SEQ ID NO: 1017 - protein, 111 aa, synthetic construct
  REGION 1..111: note = Synthetic Sequence
DIVLTQSPASLAVSLGQRATISCRASQSVSTSSYSYVHWYQQKPGQPPKLLIKYASNLESGVPARFSGSGSGTDFTLNIHPVEEEDTATYYCQHSWEIPYTFGGGTKLEIK

SEQ ID NO: 1018 - protein, 107 aa, synthetic construct
  REGION 1..107: note = Synthetic Sequence
DIQMTQSPSSLSASVGDRVTITCKASQSVSNDVAWYQQKPGKAPKLLIYYAANRYTGVPDRFSGSGYGTDFTFTISSLQPEDIATYFCQQDYTSPYTFGQGTKLEIK

SEQ ID NO: 1019 - protein, 111 aa, synthetic construct
  REGION 1..111: note = Synthetic Sequence
DIVLTQSPASLAVSPGQRATITCRASQSVSTSSSSFMHWYQQKPGQPPKLLIKYASNLESGVPARFSGSGSGTDFTLTINPVEANDTANYYCQHSWEIPYTFGQGTKLEIK

SEQ ID NO: 1020 - protein, 117 aa, synthetic construct
  REGION 1..117: note = Synthetic Sequence
EVQLVQSGAEVKKPGESLRISCKGSGYTFTTYWMHWVRQATGQGLEWMGNIYPGTGGSNFDEKFKNRVTITADKSTSTAYMELSSLRSEDTAVYYCTRWTTGTGAYWGQGTTVTVSS

SEQ ID NO: 1021 - protein, 117 aa, synthetic construct
  REGION 1..117: note = Synthetic Sequence
EVQLVQSGAEVKKPGESLRISCKGSGYTFTTYWMHWIRQSPSRGLEWLGNIYPGTGGSNFDEKFKNRFTISRDNSKNTLYLQMNSLRAEDTAVYYCTRWTTGTGAYWGQGTTVTVSS

SEQ ID NO: 1022 - protein, 117 aa, synthetic construct
  REGION 1..117: note = Synthetic Sequence
QVQLVQSGAEVKKPGASVKVSCKASGYTFTTYWMHWIRQSPSRGLEWLGNIYPGTGGSNFDEKFKNRFTISRDNSKNTLYLQMNSLRAEDTAVYYCTRWTTGTGAYWGQGTTVTVSS

SEQ ID NO: 1023 - protein, 117 aa, synthetic construct
  REGION 1..117: note = Synthetic Sequence
EVQLVQSGAEVKKPGESLRISCKGSGYTFTTYWMHWVRQAPGQGLEWMGNIYPGTGGSNFDEKFKNRFTISRDNSKNTLYLQMNSLRAEDTAVYYCTRWTTGTGAYWGQGTTVTVSS

SEQ ID NO: 1024 - protein, 113 aa, synthetic construct
  REGION 1..113: note = Synthetic Sequence
EIVLTQSPATLSLSPGERATLSCKSSQSLLDSGNQKNFLTWYQQKPGQAPRLLIYWASTRESGVPSRFSGSGSGTEFTLTISSLQPDDFATYYCQNDYSYPYTFGQGTKVEIK

SEQ ID NO: 1025 - protein, 113 aa, synthetic construct
  REGION 1..113: note = Synthetic Sequence
DIQMTQSPSSLSASVGDRVTITCKSSQSLLDSGNQKNFLTWYQQKPGQAPRLLIYWASTRESGIPPRFSGSGYGTDFTLTINNIESEDAAYYFCQNDYSYPYTFGQGTKVEIK

SEQ ID NO: 1026 - protein, 113 aa, synthetic construct
  REGION 1..113: note = Synthetic Sequence
EIVLTQSPATLSLSPGERATLSCKSSQSLLDSGNQKNFLTWYQQKPGKAPKLLIYWASTRESGVPSRFSGSGSGTDFTFTISSLQPEDIATYYCQNDYSYPYTFGQGTKVEIK

SEQ ID NO: 1027 - protein, 113 aa, synthetic construct
  REGION 1..113: note = Synthetic Sequence
DIVMTQTPLSLPVTPGEPASISCKSSQSLLDSGNQKNFLTWYQQKPGQAPRLLIYWASTRESGVPSRFSGSGSGTDFTFTISSLEAEDAATYYCQNDYSYPYTFGQGTKVEIK

SEQ ID NO: 1028 - protein, 113 aa, synthetic construct
  REGION 1..113: note = Synthetic Sequence
EIVLTQSPATLSLSPGERATLSCKSSQSLLDSGNQKNFLTWYQQKPGKAPKLLIYWASTRESGVPSRFSGSGSGTDFTFTISSLEAEDAATYYCQNDYSYPYTFGQGTKVEIK

SEQ ID NO: 1029 - protein, 113 aa, synthetic construct
  REGION 1..113: note = Synthetic Sequence
EIVLTQSPDFQSVTPKEKVTITCKSSQSLLDSGNQKNFLTWYQQKPGQAPRLLIYWASTRESGVPSRFSGSGSGTDFTFTISSLEAEDAATYYCQNDYSYPYTFGQGTKVEIK

SEQ ID NO: 1030 - protein, 113 aa, synthetic construct
  REGION 1..113: note = Synthetic Sequence
EIVLTQSPATLSLSPGERATLSCKSSQSLLDSGNQKNFLTWYQQKPGQAPRLLIYWASTRESGVPSRFSGSGSGTDFTFTISSLEAEDAATYYCQNDYSYPYTFGQGTKVEIK

SEQ ID NO: 1031 - protein, 113 aa, synthetic construct
  REGION 1..113: note = Synthetic Sequence
DIQMTQSPSSLSASVGDRVTITCKSSQSLLDSGNQKNFLTWYLQKPGQSPQLLIYWASTRESGVPSRFSGSGSGTDFTFTISSLEAEDAATYYCQNDYSYPYTFGQGTKVEIK

SEQ ID NO: 1032 - protein, 113 aa, synthetic construct
  REGION 1..113: note = Synthetic Sequence
DVVMTQSPLSLPVTLGQPASISCKSSQSLLDSGNQKNFLTWYQQKPGKAPKLLIYWASTRESGVPSRFSGSGSGTDFTFTISSLEAEDAATYYCQNDYSYPYTFGQGTKVEIK

SEQ ID NO: 1033 - protein, 118 aa, synthetic construct
  REGION 1..118: note = Synthetic Sequence
EVQLVESGGGLVQPGGSLRLSCAASGFTFSDSWIHWVRQAPGKGLEWVAWISPYGGSTYYADSVKGRFTISADTSKNTAYLQMNSLRAEDTAVYYCARRHWPGGFDYWGQGTLVTVSA

SEQ ID NO: 1034 - protein, 108 aa, synthetic construct
  REGION 1..108: note = Synthetic Sequence
DIQMTQSPSSLSASVGDRVTITCRASQDVSTAVAWYQQKPGKAPKLLIYSASFLYSGVPSRFSGSGSGTDFTLTISSLQPEDFATYYCQQYLYHPATFGQGTKVEIKR

SEQ ID NO: 1035 - protein, 126 aa, synthetic construct
  REGION 1..126: note = Synthetic Sequence
EVQLVESGGGLVQPGGSLRLSCAASGFTLDYYAIGWFRQAPGKEREWASSISSSDGSTYYADSVKGRFTISRDNAKNTVFLQMNSLKPEDTAVYSCAASQAPITIATMMKPFYDYWGQGTQVTVSS

SEQ ID NO: 1036 - protein, 123 aa, synthetic construct
  REGION 1..123: note = Synthetic Sequence
EVQLVESGGGLVQPGGSLRLSCAASGFTLDYYAKCWFRQAPGKEREWVSCISSSDGSTYYADSVKGRFTISRDNAKNTVYLQMNSLKPEDTAVYFCAARHGGPLTVEYFFDYWGQGTQVTVSS

SEQ ID NO: 1037 - protein, 124 aa, synthetic construct
  REGION 1..124: note = Synthetic Sequence
EVQLVESGGGLVQPGGSLRLSCAASGFTFDYYAIGWFRQAPGKAREGVSCISGGDNSTYYADSVKGRFTISRDNAKNTVYLQMNSLKPEDTAVYYCATGGWKYCSGYDPEYIYWGQGTQVTVSS

SEQ ID NO: 1038 - protein, 115 aa, synthetic construct
  REGION 1..115: note = Synthetic Sequence
EVQLVESGGGLVQAGGSLRLSCAASGSTFSQYDVGWYRQAPGKQRELVAFSSSGGRTIYPDSVKGRFTFSRDNTKNTVYLQMTSLKPEDTAVYYCKIDWYLNSYWGQGTQVTVSS

SEQ ID NO: 1039 - protein, 114 aa, synthetic construct
  REGION 1..114: note = Synthetic Sequence
EVQLVESGGGLVQAGGSLRLSCAASGVDASNSAMGWYRQAPGKQREWVARITGGGLIAYTDSVKGRFTISRDNAKSTVYLQMNSLEPEDTAVYYCNTINSRDGWGQGTQVTVSS

SEQ ID NO: 1040 - protein, 111 aa, synthetic construct
  REGION 1..111: note = Synthetic Sequence
EVQLVESGGGLVQAGGSLTISCAASGITFSDSIVSWYRRARGKQREWVAGISNGGTTKYAESVLGRFTISRDNAKNNVYLQMNGLNPEDTAVYLCKVRQYWGQGTQVTVSS

SEQ ID NO: 1041 - protein, 130 aa, synthetic construct
  REGION 1..130: note = Synthetic Sequence
EVQLVESGGGLVQAGGSLRLSCAASESTVLINAMGWYRQAPGKQRELVASISSGGSTNYADSVKGRFTISRDNAKNTVYLQMNSLKPEDTAVYYCNADVYPQDYGLGYVEGKVYYGHDYWGTGTLVTVSS

SEQ ID NO: 1042 - protein, 119 aa, synthetic construct
  REGION 1..119: note = Synthetic Sequence
EVQLVESGGGLVQAGGSLRLSCAASGSTFSNYVSNYAMGWGRQAPGTQRELVASISNGDTTNYADSVKGRFTISRDNAKNTVYLQMNSLKPEDTAVYYCFEHQVAGLTWGQGTQVTVSS

SEQ ID NO: 1043 - protein, 118 aa, synthetic construct
  REGION 1..118: note = Synthetic Sequence
  SITE 27: note = misc_feature - Xaa can be any naturally occurring amino acid
  SITE 32: note = misc_feature - Xaa can be any naturally occurring amino acid
  SITE 75: note = misc_feature - Xaa can be any naturally occurring amino acid
EVQLVESGGGLVQAGGSLRLSCVASGXALKIXVMGWYRQAPGKQRELVAAITSGGRTNYSDSVKGRFTISGDNAXNTVYLQMNSLKSEDTAVYYCREWNSGYPPVDYWGQGTQVTVSS

SEQ ID NO: 1044 - protein, 120 aa, synthetic construct
  REGION 1..120: note = Synthetic Sequence
EVQLVESGGGLVQAGGSLRLSCAASGRTFSSGTMGWFRRAPGKEREFVASIPWSGGRTYYADSVKDRFTISRDNAQNTVFLQMNSLKPEDTAVYYCAFKERSTGWDFASWGQGIQVTVSS

SEQ ID NO: 1045 - protein, 127 aa, synthetic construct
  REGION 1..127: note = Synthetic Sequence
EVQLVESGGGLVQTGGSLRLSCAASGFTLDYYGIGWFRQAPGKEREGVSFISGSDGSTYYAESVKGRFTISRDKAKNTVYLQMNSLKPEDTAVYYCAADPWGPPSIATMTSYEYKHWGQGTQVTVSS

SEQ ID NO: 1046 - protein, 113 aa, synthetic construct
  REGION 1..113: note = Synthetic Sequence
EVQLVESGGGLVQPGGSLRLSCAASGFTFSTYTMIWLRRAPGKGFEWVSTIDKDGNTNYVDSVKGRFAVSRDNTKNTLYLQMNSLKPEDTAMYYCTKHGSSARGQGTRVTVSS

SEQ ID NO: 1047 - protein, 114 aa, synthetic construct
  REGION 1..114: note = Synthetic Sequence
EVQLVESGGGLVEPGGSLRLSCVASGFTFSSYDMSWVRQAPGKGLEWVSTINSGGGITYRGSVKGRFTISRDNAKNTLYLQMNSLKPEDTAVYYCENGGSSYRRGQGTQVTVSS

SEQ ID NO: 1048 - protein, 114 aa, synthetic construct
  REGION 1..114: note = Synthetic Sequence
QVQLVQSGAELKKPGASVKMSCKASGYTFTGYTMHWVKQAPGQGLEWIGYINPRSGYTEYNQKFKDRTTLTADKSTSTAYMELSSLRSEDSAVYYCARPWFAYWGQGTLVTVSS

SEQ ID NO: 1049 - protein, 114 aa, synthetic construct
  REGION 1..114: note = Synthetic Sequence
QVQLVQSGAEVKKPGASVKMSCKASGYTFTGYTMHWVKQAPGQGLEWIGYINPRSGYTEYNQKFKDRTTLTADKSTSTAYMELSSLRSEDTAVYYCARPWFAYWGQGTLVTVSS

SEQ ID NO: 1050 - protein, 114 aa, synthetic construct
  REGION 1..114: note = Synthetic Sequence
QVQLVQSGAEVKKPGASVKMSCKASGYTFTGYTMHWVRQAPGQGLEWIGYINPRSGYTEYNQKFKDRTTLTADKSTSTAYMELSSLRSEDTAVYYCARPWFAYWGQGTLVTVSS

SEQ ID NO: 1051 - protein, 114 aa, synthetic construct
  REGION 1..114: note = Synthetic Sequence
QVQLVQSGAEVKKPGASVKVSCKASGYTFTGYTMHWVRQAPGQGLEWIGYINPRSGYTEYNQKFKDRTTLTADKSTSTAYMELSSLRSEDTAVYYCARPWFAYWGQGTLVTVSS

SEQ ID NO: 1052 - protein, 114 aa, synthetic construct
  REGION 1..114: note = Synthetic Sequence
QVQLVQSGAEVKKPGASVKVSCKASGYTFTGYTMHWVRQAPGQGLEWIGYINPRSGYTEYNQKFKDRTTITADKSTSTAYMELSSLRSEDTAVYYCARPWFAYWGQGTLVTVSS

SEQ ID NO: 1053 - protein, 113 aa, synthetic construct
  REGION 1..113: note = Synthetic Sequence
DIVMTQSPASLTVTPGEKVTITCKSSQSLLNSGNQKNYLTWYQQKPGQPPKLLIYWASTRESGVPDRFTGSGSGTDFTLTISSLQAEDVAVYYCQNDYSYPLTFGQGTKLEIK

SEQ ID NO: 1054 - protein, 113 aa, synthetic construct
  REGION 1..113: note = Synthetic Sequence
DIVMTQSPASLSVTPGEKVTITCKSSQSLLNSGNQKNYLTWYQQKPGQPPKLLIYWASTRESGVPDRFTGSGSGTDFTLTISSLQAEDVAVYYCQNDYSYPLTFGQGTKLEIK

SEQ ID NO: 1055 - protein, 113 aa, synthetic construct
  REGION 1..113: note = Synthetic Sequence
DIVMTQSPAFLSVTPGEKVTITCKSSQSLLNSGNQKNYLTWYQQKPGQPPKLLIYWASTRESGVPDRFTGSGSGTDFTLTISSLQAEDVAVYYCQNDYSYPLTFGQGTKLEIK

SEQ ID NO: 1056 - protein, 113 aa, synthetic construct
  REGION 1..113: note = Synthetic Sequence
DIVMTQSPAFLSVTPGEKVTITCKSSQSLLNSGNQKNYLTWYQQKPGQPPKLLIYWASTRESGVPDRFSGSGSGTDFTLTISSLQAEDVAVYYCQNDYSYPLTFGQGTKLEIK

SEQ ID NO: 1057 - protein, 504 aa, Homo sapiens
  REGION 1..504: note = MISC_FEATURE - exemplary human SIRP1alpha polypeptide
  REGION 1..504: note = MISC_FEATURE - exemplary human SIRP1alpha polypeptide with a signal peptidesequence
MEPAGPAPGRLGPLLCLLLAASCAWSGVAGEEELQVIQPDKSVLVAAGETATLRCTATSLIPVGPIQWFRGAGPGRELIYNQKEGHFPRVTTVSDLTKRNNMDFSIRIGNITPADAGTYYCVKFRKGSPDDVEFKSGAGTELSVRAKPSAPVVSGPAARATPQHTVSFTCESHGFSPRDITLKWFKNGNELSDFQTNVDPVGESVSYSIHSTAKVVLTREDVHSQVICEVAHVTLQGDPLRGTANLSETIRVPPTLEVTQQPVRAENQVNVTCQVRKFYPQRLQLTWLENGNVSRTETASTVTENKDGTYNWMSWLLVNVSAHRDDVKLTCQVEHDGQPAVSKSHDLKVSAHPKEQGSNTAAENTGSNERNIYIVVGVVCTLLVALLMAALYLVRIRQKKAQGSTSSTRLHEPEKNAREITQDTNDITYADLNLPKGKKPAPQAAEPNNHTEYASIQTSPQPASEDTLTYADLDMVHLNRTPKQPAPKPEPSFSEYASVQVPRK

SEQ ID NO: 1058 - protein, 474 aa, Homo sapiens
  REGION 1..474: note = MISC_FEATURE - exemplary human SIRP1alpha polypeptide without a signal peptidesequence
EEELQVIQPDKSVLVAAGETATLRCTATSLIPVGPIQWFRGAGPGRELIYNQKEGHFPRVTTVSDLTKRNNMDFSIRIGNITPADAGTYYCVKFRKGSPDDVEFKSGAGTELSVRAKPSAPVVSGPAARATPQHTVSFTCESHGFSPRDITLKWFKNGNELSDFQTNVDPVGESVSYSIHSTAKVVLTREDVHSQVICEVAHVTLQGDPLRGTANLSETIRVPPTLEVTQQPVRAENQVNVTCQVRKFYPQRLQLTWLENGNVSRTETASTVTENKDGTYNWMSWLLVNVSAHRDDVKLTCQVEHDGQPAVSKSHDLKVSAHPKEQGSNTAAENTGSNERNIYIVVGVVCTLLVALLMAALYLVRIRQKKAQGSTSSTRLHEPEKNAREITQDTNDITYADLNLPKGKKPAPQAAEPNNHTEYASIQTSPQPASEDTLTYADLDMVHLNRTPKQPAPKPEPSFSEYASVQVPRK

SEQ ID NO: 1059 - protein, 508 aa, Homo sapiens
  REGION 1..508: note = MISC_FEATURE - SIRP1alpha targeting moiety
MEPAGPAPGRLGPLLCLLLAASCAWSGVAGEEELQVIQPDKSVLVAAGETATLRCTATSLIPVGPIQWFRGAGPGRELIYNQKEGHFPRVTTVSDLTKRNNMDFSIRIGNITPADAGTYYCVKFRKGSPDDVEFKSGAGTELSVRAKPSAPVVSGPAARATPQHTVSFTCESHGFSPRDITLKWFKNGNELSDFQTNVDPVGESVSYSIHSTAKVVLTREDVHSQVICEVAHVTLQGDPLRGTANLSETIRVPPTLEVTQQPVRAENQVNVTCQVRKFYPQRLQLTWLENGNVSRTETASTVTENKDGTYNWMSWLLVNVSAHRDDVKLTCQVEHDGQPAVSKSHDLKVSAHPKEQGSNTAAENTGSNERNIYIVVGVVCTLLVALLMAALYLVRIRQKKAQGSTSSTRLHEPEKNAREITQVQSLDTNDITYADLNLPKGKKPAPQAAEPNNHTEYASIQTSPQPASEDTLTYADLDMVHLNRTPKQPAPKPEPSFSEYASVQVPRK

SEQ ID NO: 1060 - protein, 503 aa, Homo sapiens
  REGION 1..503: note = MISC_FEATURE - a polypeptide encoding human SIRP1alpha isoform 4
  REGION 1..503: note = MISC_FEATURE - polypeptide encoding human SIRP1alpha isoform 4
MEPAGPAPGRLGPLLCLLLAASCAWSGVAGEEELQVIQPDKSVLVAAGETATLRCTATSLIPVGPIQWFRGAGPGRELIYNQKEGHFPRVTTVSDLTKRNNMDFSIRIGNITPADAGTYYCVKFRKGSPDVEFKSGAGTELSVRAKPSAPVVSGPAARATPQHTVSFTCESHGFSPRDITLKWFKNGNELSDFQTNVDPVGESVSYSIHSTAKVVLTREDVHSQVICEVAHVTLQGDPLRGTANLSETIRVPPTLEVTQQPVRAENQVNVTCQVRKFYPQRLQLTWLENGNVSRTETASTVTENKDGTYNWMSWLLVNVSAHRDDVKLTCQVEHDGQPAVSKSHDLKVSAHPKEQGSNTAAENTGSNERNIYIVVGVVCTLLVALLMAALYLVRIRQKKAQGSTSSTRLHEPEKNAREITQDTNDITYADLNLPKGKKPAPQAAEPNNHTEYASIQTSPQPASEDTLTYADLDMVHLNRTPKQPAPKPEPSFSEYASVQVPRK

SEQ ID NO: 1061 - protein, 760 aa, Homo sapiens [sequence omitted]

SEQ ID NO: 1062 - protein, 134 aa, Homo sapiens
QVQLQESGGGLVQAGGSLRLSCAASGGFDSRNAMGWYRQAPGKRREWVATITSDGRTNYADSVKARFTISRDNSKNTVYLQMNSLKPEDTAVYYCNAAPPIFGSWGQGTQVTVSSAAAYPYDVPDYGSHHHHHH

SEQ ID NO: 1063 - protein, 134 aa, Homo sapiens
QVQLQESGGGLVRAGGSLRLSCAASGTFDSRNAMGWYRQAPGKRREWVATITTDGRTNYADSVKARFTISRDNAKNTVYLQMNSLKPEDTAVYYCNAAPPIFGSWGQGTQVTVSSAAAYPYDVPDYGSHHHHHH

SEQ ID NO: 1064 - protein, 134 aa, Homo sapiens
QVQLQESGGGLVQAGGSLRLSCAASGSFDSRNAMGWYRQAPGKRREWVATITTDGRTNYADSVKARFTVSRDNAKNTVYLQMNSLKPDDTAVYYCNAAPPIFNSWGQGTQVTVSSAAAYPYDVPDYGSHHHHHH

SEQ ID NO: 1065 - protein, 134 aa, Homo sapiens
QVQLQESGGGLVQAGGSLRLSCAASGSIDIRNAMGWYRQAPGTRREWVATITTDGRTNYADSVKARFTISRDNAKNTVYLQMNSLKPEDTAVYYCNLAPPIFGSWGQGTQVTVSSAAAYPYDVPDYGSHHHHHH

SEQ ID NO: 1066 - protein, 134 aa, Homo sapiens
QVQLQESGGGLVQAGGSLRLSCAASGSIDSRNTMGWYRQAPGKRREWVATITTGGRTNYADSVKARFTISRDNAKNTVYLQMNSLKPEDTAVYYCNLAPPIFNSWGQGTQVTVSSAAAYPYDVPDYGSHHHHHH

SEQ ID NO: 1067 - protein, 134 aa, Homo sapiens
QVQLQESGGGLVQAGGSLRLSCTVAESIDVRNAMGWYRQAPGKRREWVATITTGGRTNYADSVKARFTISRDNAKNTVYLQMNSLKPEDTAVYYCNAAPPILNSWGQGTQVTVSSAAAYPYDVPDYGSHHHHHH

SEQ ID NO: 1068 - protein, 134 aa, Homo sapiens
QVQLQESGGGLVRVGGSLRLSCAVSGSFDSRNSMGWYRQAPGKRREWVATITSGSRTNYADSVKARFTISRDNAKNTVYLQMDSLKPEDTAVYYCNAAPPIFNSWGQGTQVTVSSAAAYPYDVPDYGSHHHHHH

SEQ ID NO: 1069 - protein, 134 aa, Homo sapiens
QVQLQESGGGLVQAGGSLRLSCAVSGRLFSANTMGWYRQAPGKRRELVATILSSGSTNYADSVKGRFTISRDDAKNTVYLQMNSLKPEDTAVYYCNLAPPPEGYWGQGTQVTVSSAAAYPYDVPDYGSHHHHHH

SEQ ID NO: 1070 - protein, 134 aa, Homo sapiens
QVQLQESGGGLVQAGGSLRLSCAVSGRLFSANTMGWYRQAPGKRRELVATILSSGSTNYADSVKGRFTISRDDGKNTVYLQMNSLKPDDTAVYYCNFAPPPEGYWGQGTQVTVSSAAAYPYDVPDYGSHHHHHH

SEQ ID NO: 1071 - protein, 136 aa, Homo sapiens
QVQLQESGGGLVQAGGSLRLSCAASGSIFVGNAMGWYRQALGNQRELVAGITSDGTTYYPDSVKGRFTISRDNDKNTIYLQMNSLKPEDTAVYYCNLWPPRIGFASWGQGTQVTVSSAAAYPYDVPDYGSHHHHHH

SEQ ID NO: 1072 - protein, 136 aa, Homo sapiens
QVQLQESGGGLVQTGGSLRLSCAASGSIFVGNAMGWYRQALGNQRELVAGITSDGTTYYPDSVKGRFTISRDNDKNTIYLQMNSLKPEDTAVYYCNLWPPRIGFASWGQGTQVTVSSAAAYPYDVPDYGSHHHHHH

SEQ ID NO: 1073 - protein, 136 aa, Homo sapiens
QVQLQESGGGLVRAGGSLRLSCAASGSIFVGNAMGWYRQALGNQRELVAGITSDGTTYYPDSVKGRFTISRDNDKNTIYLQMNSLKPEDTAVYYCNLWPPRIGFASWGQGTQVTVSSAAAYPYDVPDYGSHHHHHH

SEQ ID NO: 1074 - protein, 136 aa, Homo sapiens; identical to SEQ ID NO: 1072

SEQ ID NO: 1075 - protein, 136 aa, Homo sapiens
QVQLQESGGGLVQAGGSLRLSCAASGSISMLNSMGWYRQALGKQREFVAGITSGGRTNYADSVKGRFAISRDNDKNTVYLQMNSLKPEDTAVYYCNTWPPRIAFDSWGQGTQVTVSSAAAYPYDVPDYGSHHHHHH

SEQ ID NO: 1076 - protein, 140 aa, Homo sapiens
QVQLQESGGGLVQAGGSLRLSCAASGSIFSSNAMGWYRQAAGKRRELVAGIRSDGNTNYVDSVKGRFTISRDRAKNTVYLQMTSLKPEDTAVYYCNYWPPPLRQGGDYAYWGQGTQVTVSSAAAYPYDVPDYGSHHHHHH

SEQ ID NO: 1077 - protein, 136 aa, Homo sapiens
QVQLQESGGGLVQAGGSLRLSCVVSGSFDSRNAMAWYRQALGKERVWVAGIISDGSTNYADAVKGRFTISRDNDKNTVYLQMNSLKPEDTAVYYCNAWPPRIGLGSWGQGTQVTVSSAAAYPYDVPDYGSHHHHHH

SEQ ID NO: 1078 - protein, 135 aa, Homo sapiens
QVQLQESGGGLVQAGGSLRLSCAASGTMSSINAMGWYRQAPGKQRELVAGILSDGTTKYVESVKGRFTISRDNAKNTVHLQMNSLKVEDTAVYYCNFFPPPVPASWGQGTQVTVSSAAAYPYDVPDYGSHHHHHH

SEQ ID NO: 1079 - protein, 134 aa, Homo sapiens
QVQLQESGGGLVQAGGSLRLSCAVSGIISSMNAMGWYRQAPGKRRELVAGLGSGVSTTYADAVKGRFTISRDNAKNTLYLQMNSLKPEDTAVYYCNRWPPPYDYWGQGTQVTVSSAAAYPYDVPDYGSHHHHHH

SEQ ID NO: 1080 - protein, 137 aa, Homo sapiens
QVQLQESGGGLVQAGGSLRLSCVVSGTILSSNSMGWYRQAPGKRRELVASISTDGSTNYADSVKGRFTISRDNAKSTVFLQMNSLKPEDTAVYYCNFHPPVVRDWGDTYWGTQVTVSSAAAYPYDVPDYGSHHHHHH

SEQ ID NO: 1081 - protein, 136 aa, Homo sapiens
QVQLQESGGGLVQAGGSLRLSCAASRSIFSIGTMGWYRQAPGKRRELVAFITVDHNTYYTDSVKGRFTISTENDKNTVYLQMNSLKPEDTAVYYCNRAPPSTDGDRWGQGTQVTVSSAAAYPYDVPDYGSHHHHHH

SEQ ID NO: 1082 - protein, 142 aa, Homo sapiens
QVQLQESGGGLVQAGGSLRLSCAASGRTFSTYAMGWFRQAPGKERELVAAISNGGSAYYADSVKGRFTISRDNARNTVYLQTNSLKPEDTAVYYCAARRGSAYYTNRIDWPYWGQGTQVTVSSAAAYPYDVPDYGSHHHHHH

SEQ ID NO: 1083 - protein, 142 aa, Homo sapiens
QVQLQESGGGLVQAGGSLRLSCAASGRTFSSYAMGWFRQAPGKERELVAAISNGGSAYYADSVKGRFTISRDNARNTVYLQTNSLKPEDTAVYYCAARRGSAYYTNRIDWPYWGQGTQVTVSSAAAYPYDVPDYGSHHHHHH

SEQ ID NO: 1084 - protein, 142 aa, Homo sapiens
QVQLQESGGGLVEAEGSLRLSCIASGRTFGTYAMGWFRQAPGKERELVAAISSGGSAYYADSVKGRFTISRDNARNTVYLQTNSLKPEDTAVYYCAARRGSAYYTNRIDWPYWGQGTQVTVSSAAAYPYDVPDYGSHHHHHH

SEQ ID NO: 1085 - protein, 142 aa, Homo sapiens
QVQLQESGGGLVEAEGSLRLSCIASGRTFGTYAMGWFRQAPGKERELVAAISTGGSTYYADSVKGRFTISRDNARNTVYLQTNSLKPEDTAVYYCAARRGSAYYTNHVDWPYWGQGTQVTVSSAAAYPYDVPDYGSHHHHHH

SEQ ID NO: 1086 - protein, 142 aa, Homo sapiens
QVQLQESGGGLVEAEGSLRLSCAASGRTFGSYAMGWFRQAPGKSRELVAAISSGGTTYYADSVKGRFTISRDNARNTVYLQTNSLKPEDTAVYYCAARTGSAYYTNRIDWPYWGQGTQVTVSSAAAYPYDVPDYGSHHHHHH

SEQ ID NO: 1087 - protein, 142 aa, Homo sapiens
QVQLQESGGGLVEAEGSLRLSCAASGRTFGSYAMGWFRQAPGKSRELVAAISSGGTTYYADSVKGRFTISRDNARNTVYLQTNSPKPEDTAVYYCAARTGSAYYTNRIDWPYWGQGTQVTVSSAAAYPYDVPDYGSHHHHHH

SEQ ID NO: 1088 - protein, 142 aa, Homo sapiens
QVQLQESGGGLVEAEGSLRLSCAASGRTFGTYALAWFRQAPGKSRELVAAISSGGSTYYADSVKGRFTISRDNARNTVYLQTNSLKPEDTAVYYCAAKTGSAYYTNRIDWPYWGQGTQVTVSSAAAYPYDVPDYGSHHHHHH

SEQ ID NO: 1089 - protein, 142 aa, Homo sapiens
QVQLQESGGGLVEAEGSLRLSCAASGRAFGSYAMGWFRQAPGLERELVAAISSGGTTYYADSVKGRFTISRDNARNTVYLQTNSLKPEDTAVYYCAARTGGAAYTRRIDWPYWGQGTQVTVSSAAAYPYDVPDYGSHHHHHH

SEQ ID NO: 1090 - protein, 142 aa, Homo sapiens
QVQLQESGGGLVEAEGSLRLSCAASGRTFGSYAMGWFRQAAGKERELVAAISAGGSTLYADNVKGRFTISRDNARNTVYLLSNSLKPEDTAVYYCAARRGSAYYTNHIDWPYWGQGTQVTVSSAAAYPYDVPDYGSHHHHHH

SEQ ID NO: 1091 - protein, 142 aa, Homo sapiens
QVQLQESGGGLVQPGGSLRLSCAASGRTFGSYAMGWFRQAAGKERELVAAISAGGSTLYADNVKGRFTISRDNARNTVYLLSNSLKPEDTAVYYCAARRGSAYYTNHIDWPYWGQGTQVTVSSAAAYPYDVPDYGSHHHHHH

SEQ ID NO: 1092 - protein, 142 aa, Homo sapiens
QVQLQESGGGLVEAEGSLRLSCAASGRTFGSYAMGWFRQAPGKERELVAAISSGGSTLYADSVKGRFTISRDNAKNTVYLQMNSLKPEDTAVYYCAARSGGAYYTARVDWPYWGQGTQVTVSSAAAYPYDVPDYGSHHHHHH

SEQ ID NO: 1093 - protein, 142 aa, Homo sapiens
QVQLQESGGGLVEAEGSLRLSCAASGRTFGSYAMGWFRQAPGKERELVAAISSGGSTLYAGSVKGRFTISKDNAKNTVYLQMNSLKPEDTAVYYCAARSGGAYYTARVDWPYWGQGTQVTVSSAAAYPYDVPDYGSHHHHHH

SEQ ID NO: 1094 - protein, 142 aa, Homo sapiens
QVQLQESGGGLVEAEGSPRLSCAASGRTFGSYAMGWFRQAPGKERELVAAISSGGITYYADSVKGRFTISRDNAKNTVYLQMNSLKPEDTAVYYCAARSGSAYYTTRVDWPYWGQGTQVTVSSAAAYPYDVPDYGSHHHHHH

SEQ ID NO: 1095 - protein, 142 aa, Homo sapiens
QVQLQESGGGLVQAGGSLRLSCAASGNIDSIASMGWYRQAPGKQRELVAAISVGGSTYYADSVKGRFTISRDNARNTVYLQTNSLKPEDTAVYYCAARRGSAYYTSRIDWPYWGQGTQVTVSSAAAYPYDVPDYGSHHHHHH

SEQ ID NO: 1096 - protein, 142 aa, Homo sapiens
QVQLQESGGGLVQAEGSLRLSCAASGRTFGSYAMGWFRQAPGKERELVAGISSGGITNYAHSVKGRFTISRDIDKNTVFLQMNSLKPEDTAVYYCAARSGGAYYTSRVDWPYWGQGTQVTVSSAAAYPYDVPDYGSHHHHHH

SEQ ID NO: 1097 - protein, 142 aa, Homo sapiens
  SITE 13: note = misc_feature - Xaa can be any naturally occurring amino acid
QVQLQESGGGLVXAGGSLRLSCAASGRTFSDYAMGWFRQAPGKEREFIAGISWGGSSTYYADSVKGRFTISRDNAKNTMYLQMNSLKPEDTAVYYCAARLSGVSRSDRPYDYWGQGTQVTVSSAAAYPYDVPDYGSHHHHHH

SEQ ID NO: 1098 - protein, 142 aa, Homo sapiens
QVQLQESGGGLVQAGGSLRLSCAASGRTFSMYAIGWFRQAPGKERELVASISSGGSTNYADSVKGRFTISRDNAEKTVYLQMMSLEPEATGVYYCAARDGSALYTAHSDWDYWGQGTQVTVSSAAAYPYDVPDYGSHHHHHH

SEQ ID NO: 1099 - protein, 142 aa, Homo sapiens
QVQLQESGGGLVQPGDSLRLSCAASERTFSMYAIGWFRQAPGKERELVAGISSGGSTNYADSVKGRFTISRDNPKKTVYLQMMSLEPEDTGVYYCAARSGSAYFSGRYYWNYWGQGTQVTVSSAAAYPYDVPDYGSHHHHHH

SEQ ID NO: 1100 - protein, 142 aa, Homo sapiens
QVQLQESGGGLVQAGDSLRLSCAASGRTFSSYVMGWFRQVPGKQRELVAAITSGLSTYYADSLKGRFTISRDNAKNTMYLQMNSLKLEDTAVYYCAAREGGGIWTSSTQYDYWGQGTQVTVSSAAAYPYDVPDYGSHHHHHH

SEQ ID NO: 1101 - protein, 137 aa, Homo sapiens
QVQLQESGGGLVQAGGSLRLSCVASGTIFSSGAMAMGWYRQAPGKQREWVAGITGSRTTTYADSVKGRFTISRDNAENTVFLQMNNLKSEDTAVYYCNLWPPSRPDHWGQGTQVTVSSAAAYPYDVPDYGSHHHHHH

SEQ ID NO: 1102 - protein, 134 aa, Homo sapiens
QVQLQESGGGLVQAGGSLRLSCVASGTISSGAMGWYRQVPGKQREWVAGITGSRTTMYTESVKGRFTISRDNAENTVFLQMNNLKSEDTAVYYCNLWPPSRPDYWGQGTQVTVSSAAAYPYDVPDYGSHHHHHH

SEQ ID NO: 1103 - protein, 115 aa, Homo sapiens
QVQLQESGGGLVQAGGSLRLSCAASGGFDSRNAMGWYRQAPGKRREWVATITSDGRTNYADSVKARFTISRDNSKNTVYLQMNSLKPEDTAVYYCNAAPPIFGSWGQGTQVTVSS

SEQ ID NO: 1104 - protein, 115 aa, Homo sapiens
QVQLQESGGGLVRAGGSLRLSCAASGTFDSRNAMGWYRQAPGKRREWVATITTDGRTNYADSVKARFTISRDNAKNTVYLQMNSLKPEDTAVYYCNAAPPIFGSWGQGTQVTVSS

SEQ ID NO: 1105 - protein, 115 aa, Homo sapiens
QVQLQESGGGLVQAGGSLRLSCAASGSFDSRNAMGWYRQAPGKRREWVATITTDGRTNYADSVKARFTVSRDNAKNTVYLQMNSLKPDDTAVYYCNAAPPIFNSWGQGTQVTVSS

SEQ ID NO: 1106 - protein, 115 aa, Homo sapiens
QVQLQESGGGLVQAGGSLRLSCAASGSIDIRNAMGWYRQAPGTRREWVATITTDGRTNYADSVKARFTISRDNAKNTVYLQMNSLKPEDTAVYYCNLAPPIFGSWGQGTQVTVSS

SEQ ID NO: 1107 - protein, 115 aa, Homo sapiens
QVQLQESGGGLVQAGGSLRLSCAASGSIDSRNTMGWYRQAPGKRREWVATITTGGRTNYADSVKARFTISRDNAKNTVYLQMNSLKPEDTAVYYCNLAPPIFNSWGQGTQVTVSS

SEQ ID NO: 1108 - protein, 115 aa, Homo sapiens
QVQLQESGGGLVQAGGSLRLSCTVAESIDVRNAMGWYRQAPGKRREWVATITTGGRTNYADSVKARFTISRDNAKNTVYLQMNSLKPEDTAVYYCNAAPPILNSWGQGTQVTVSS

SEQ ID NO: 1109 - protein, 115 aa, Homo sapiens
QVQLQESGGGLVRVGGSLRLSCAVSGSFDSRNSMGWYRQAPGKRREWVATITSGSRTNYADSVKARFTISRDNAKNTVYLQMDSLKPEDTAVYYCNAAPPIFNSWGQGTQVTVSS

SEQ ID NO: 1110 - protein, 115 aa, Homo sapiens
QVQLQESGGGLVQAGGSLRLSCAVSGRLFSANTMGWYRQAPGKRRELVATILSSGSTNYADSVKGRFTISRDDAKNTVYLQMNSLKPEDTAVYYCNLAPPPEGYWGQGTQVTVSS

SEQ ID NO: 1111 - protein, 115 aa, Homo sapiens
QVQLQESGGGLVQAGGSLRLSCAVSGRLFSANTMGWYRQAPGKRRELVATILSSGSTNYADSVKGRFTISRDDGKNTVYLQMNSLKPDDTAVYYCNFAPPPEGYWGQGTQVTVSS

SEQ ID NO: 1112 - protein, 117 aa, Homo sapiens
QVQLQESGGGLVQAGGSLRLSCAASGSIFVGNAMGWYRQALGNQRELVAGITSDGTTYYPDSVKGRFTISRDNDKNTIYLQMNSLKPEDTAVYYCNLWPPRIGFASWGQGTQVTVSS

SEQ ID NO: 1113 - protein, 117 aa, Homo sapiens
QVQLQESGGGLVQTGGSLRLSCAASGSIFVGNAMGWYRQALGNQRELVAGITSDGTTYYPDSVKGRFTISRDNDKNTIYLQMNSLKPEDTAVYYCNLWPPRIGFASWGQGTQVTVSS

SEQ ID NO: 1114 - protein, 117 aa, Homo sapiens
QVQLQESGGGLVRAGGSLRLSCAASGSIFVGNAMGWYRQALGNQRELVAGITSDGTTYYPDSVKGRFTISRDNDKNTIYLQMNSLKPEDTAVYYCNLWPPRIGFASWGQGTQVTVSS

SEQ ID NO: 1115 - protein, 117 aa, Homo sapiens; identical to SEQ ID NO: 1113

SEQ ID NO: 1116 - protein, 117 aa, Homo sapiens
QVQLQESGGGLVQAGGSLRLSCAASGSISMLNSMGWYRQALGKQREFVAGITSGGRTNYADSVKGRFAISRDNDKNTVYLQMNSLKPEDTAVYYCNTWPPRIAFDSWGQGTQVTVSS

SEQ ID NO: 1117 - protein, 121 aa, Homo sapiens
QVQLQESGGGLVQAGGSLRLSCAASGSIFSSNAMGWYRQAAGKRRELVAGIRSDGNTNYVDSVKGRFTISRDRAKNTVYLQMTSLKPEDTAVYYCNYWPPPLRQGGDYAYWGQGTQVTVSS

SEQ ID NO: 1118 - protein, 117 aa, Homo sapiens
QVQLQESGGGLVQAGGSLRLSCVVSGSFDSRNAMAWYRQALGKERVWVAGIISDGSTNYADAVKGRFTISRDNDKNTVYLQMNSLKPEDTAVYYCNAWPPRIGLGSWGQGTQVTVSS

SEQ ID NO: 1119 - protein, 116 aa, Homo sapiens
QVQLQESGGGLVQAGGSLRLSCAASGTMSSINAMGWYRQAPGKQRELVAGILSDGTTKYVESVKGRFTISRDNAKNTVHLQMNSLKVEDTAVYYCNFFPPPVPASWGQGTQVTVSS

SEQ ID NO: 1120 - protein, 115 aa, Homo sapiens
QVQLQESGGGLVQAGGSLRLSCAVSGIISSMNAMGWYRQAPGKRRELVAGLGSGVSTTYADAVKGRFTISRDNAKNTLYLQMNSLKPEDTAVYYCNRWPPPYDYWGQGTQVTVSS

SEQ ID NO: 1121 - protein, 120 aa, Homo sapiens
QVQLQESGGGLVQAGGSLRLSCVVSGTILSSNSMGWYRQAPGKRRELVASISTDGSTNYADSVKGRFTISRDNAKSTVFLQMNSLKPEDTAVYYCNFHPPVVRDWGDTYWGTQVTVSSQG

SEQ ID NO: 1122 - protein, 117 aa, Homo sapiens
QVQLQESGGGLVQAGGSLRLSCAASRSIFSIGTMGWYRQAPGKRRELVAFITVDHNTYYTDSVKGRFTISTENDKNTVYLQMNSLKPEDTAVYYCNRAPPSTDGDRWGQGTQVTVSS

SEQ ID NO: 1123 - protein, 123 aa, Homo sapiens
QVQLQESGGGLVQAGGSLRLSCAASGRTFSTYAMGWFRQAPGKERELVAAISNGGSAYYADSVKGRFTISRDNARNTVYLQTNSLKPEDTAVYYCAARRGSAYYTNRIDWPYWGQGTQVTVSS

SEQ ID NO: 1124 - protein, 123 aa, Homo sapiens
QVQLQESGGGLVQAGGSLRLSCAASGRTFSSYAMGWFRQAPGKERELVAAISNGGSAYYADSVKGRFTISRDNARNTVYLQTNSLKPEDTAVYYCAARRGSAYYTNRIDWPYWGQGTQVTVSS

SEQ ID NO: 1125 - protein, 123 aa, Homo sapiens
QVQLQESGGGLVEAEGSLRLSCIASGRTFGTYAMGWFRQAPGKERELVAAISSGGSAYYADSVKGRFTISRDNARNTVYLQTNSLKPEDTAVYYCAARRGSAYYTNRIDWPYWGQGTQVTVSS

SEQ ID NO: 1126 - protein, 123 aa, Homo sapiens
QVQLQESGGGLVEAEGSLRLSCIASGRTFGTYAMGWFRQAPGKERELVAAISTGGSTYYADSVKGRFTISRDNARNTVYLQTNSLKPEDTAVYYCAARRGSAYYTNHVDWPYWGQGTQVTVSS

SEQ ID NO: 1127 - protein, 123 aa, Homo sapiens
QVQLQESGGGLVEAEGSLRLSCAASGRTFGSYAMGWFRQAPGKSRELVAAISSGGTTYYADSVKGRFTISRDNARNTVYLQTNSLKPEDTAVYYCAARTGSAYYTNRIDWPYWGQGTQVTVSS

SEQ ID NO: 1128 - protein, 123 aa, Homo sapiens
QVQLQESGGGLVEAEGSLRLSCAASGRTFGSYAMGWFRQAPGKSRELVAAISSGGTTYYADSVKGRFTISRDNARNTVYLQTNSPKPEDTAVYYCAARTGSAYYTNRIDWPYWGQGTQVTVSS

SEQ ID NO: 1129 - protein, 123 aa, Homo sapiens
QVQLQESGGGLVEAEGSLRLSCAASGRTFGTYALAWFRQAPGKSRELVAAISSGGSTYYADSVKGRFTISRDNARNTVYLQTNSLKPEDTAVYYCAAKTGSAYYTNRIDWPYWGQGTQVTVSS

SEQ ID NO: 1130 - protein, 123 aa, Homo sapiens
QVQLQESGGGLVEAEGSLRLSCAASGRAFGSYAMGWFRQAPGLERELVAAISSGGTTYYADSVKGRFTISRDNARNTVYLQTNSLKPEDTAVYYCAARTGGAAYTRRIDWPYWGQGTQVTVSS

SEQ ID NO: 1131 - protein, 123 aa, Homo sapiens
QVQLQESGGGLVEAEGSLRLSCAASGRTFGSYAMGWFRQAAGKERELVAAISAGGSTLYADNVKGRFTISRDNARNTVYLLSNSLKPEDTAVYYCAARRGSAYYTNHIDWPYWGQGTQVTVSS

SEQ ID NO: 1132 - protein, 123 aa, Homo sapiens
QVQLQESGGGLVQPGGSLRLSCAASGRTFGSYAMGWFRQAAGKERELVAAISAGGSTLYADNVKGRFTISRDNARNTVYLLSNSLKPEDTAVYYCAARRGSAYYTNHIDWPYWGQGTQVTVSS

SEQ ID NO: 1133 - protein, 123 aa, Homo sapiens
QVQLQESGGGLVEAEGSLRLSCAASGRTFGSYAMGWFRQAPGKERELVAAISSGGSTLYADSVKGRFTISRDNAKNTVYLQMNSLKPEDTAVYYCAARSGGAYYTARVDWPYWGQGTQVTVSS

SEQ ID NO: 1134 - protein, 123 aa, Homo sapiens
QVQLQESGGGLVEAEGSLRLSCAASGRTFGSYAMGWFRQAPGKERELVAAISSGGSTLYAGSVKGRFTISKDNAKNTVYLQMNSLKPEDTAVYYCAARSGGAYYTARVDWPYWGQGTQVTVSS

SEQ ID NO: 1135 - protein, 123 aa, Homo sapiens
QVQLQESGGGLVEAEGSPRLSCAASGRTFGSYAMGWFRQAPGKERELVAAISSGGITYYADSVKGRFTISRDNAKNTVYLQMNSLKPEDTAVYYCAARSGSAYYTTRVDWPYWGQGTQVTVSS

SEQ ID NO: 1136 - protein, 123 aa, Homo sapiens
QVQLQESGGGLVQAGGSLRLSCAASGNIDSIASMGWYRQAPGKQRELVAAISVGGSTYYADSVKGRFTISRDNARNTVYLQTNSLKPEDTAVYYCAARRGSAYYTSRIDWPYWGQGTQVTVSS

SEQ ID NO: 1137 - protein, 123 aa, Homo sapiens
QVQLQESGGGLVQAEGSLRLSCAASGRTFGSYAMGWFRQAPGKERELVAGISSGGITNYAHSVKGRFTISRDIDKNTVFLQMNSLKPEDTAVYYCAARSGGAYYTSRVDWPYWGQGTQVTVSS

SEQ ID NO: 1138 - protein, 123 aa, Homo sapiens
  SITE 13: note = misc_feature - Xaa can be any naturally occurring amino acid
QVQLQESGGGLVXAGGSLRLSCAASGRTFSDYAMGWFRQAPGKEREFIAGISWGGSSTYYADSVKGRFTISRDNAKNTMYLQMNSLKPEDTAVYYCAARLSGVSRSDRPYDYWGQGTQVTVSS

SEQ ID NO: 1139 - protein, 123 aa, Homo sapiens
QVQLQESGGGLVQAGGSLRLSCAASGRTFSMYAIGWFRQAPGKERELVASISSGGSTNYADSVKGRFTISRDNAEKTVYLQMMSLEPEATGVYYCAARDGSALYTAHSDWDYWGQGTQVTVSS

SEQ ID NO: 1140 - protein, 123 aa, Homo sapiens
QVQLQESGGGLVQPGDSLRLSCAASERTFSMYAIGWFRQAPGKERELVAGISSGGSTNYADSVKGRFTISRDNPKKTVYLQMMSLEPEDTGVYYCAARSGSAYFSGRYYWNYWGQGTQVTVSS

SEQ ID NO: 1141 - protein, 123 aa, Homo sapiens
QVQLQESGGGLVQAGDSLRLSCAASGRTFSSYVMGWFRQVPGKQRELVAAITSGLSTYYADSLKGRFTISRDNAKNTMYLQMNSLKLEDTAVYYCAAREGGGIWTSSTQYDYWGQGTQVTVSS

SEQ ID NO: 1142 - protein, 118 aa, Homo sapiens
QVQLQESGGGLVQAGGSLRLSCVASGTIFSSGAMAMGWYRQAPGKQREWVAGITGSRTTTYADSVKGRFTISRDNAENTVFLQMNNLKSEDTAVYYCNLWPPSRPDHWGQGTQVTVSS

SEQ ID NO: 1143 - protein, 115 aa, Homo sapiens
QVQLQESGGGLVQAGGSLRLSCVASGTISSGAMGWYRQVPGKQREWVAGITGSRTTMYTESVKGRFTISRDNAENTVFLQMNNLKSEDTAVYYCNLWPPSRPDYWGQGTQVTVSS

SEQ ID NO: 1144 - protein, 10 aa, Homo sapiens
GGFDSRNAMG

SEQ ID NO: 1145 - protein, 10 aa, Homo sapiens
GTFDSRNAMG

SEQ ID NO: 1146 - protein, 10 aa, Homo sapiens
GSFDSRNAMG

SEQ ID NO: 1147 - protein, 10 aa, Homo sapiens
GSIDIRNAMG

SEQ ID NO: 1148 - protein, 10 aa, Homo sapiens
GSIDSRNTMG

SEQ ID NO: 1149 - protein, 10 aa, Homo sapiens
ESIDVRNAMG

SEQ ID NO: 1150 - protein, 10 aa, Homo sapiens
GSFDSRNSMG

SEQ ID NO: 1151 - protein, 10 aa, Homo sapiens
GRLFSANTMG

SEQ ID NO: 1152 - protein, 10 aa, Homo sapiens
GSIFVGNAMG

SEQ ID NO: 1153 - protein, 10 aa, Homo sapiens
GSISMLNSMG

SEQ ID NO: 1154 - protein, 10 aa, Homo sapiens
GSIFSSNAMG

SEQ ID NO: 1155 - protein, 10 aa, Homo sapiens
GSFDSRNAMA

SEQ ID NO: 1156 - protein, 10 aa, Homo sapiens
GTMSSINAMG

SEQ ID NO: 1157 - protein, 10 aa, Homo sapiens
GIISSMNAMG

SEQ ID NO: 1158 - protein, 10 aa, Homo sapiens
GTILSSNSMG

SEQ ID NO: 1159 - protein, 10 aa, Homo sapiens
RSIFSIGTMG

SEQ ID NO: 1160 - protein, 10 aa, Homo sapiens
GRTFSTYAMG

SEQ ID NO: 1161 - protein, 10 aa, Homo sapiens
GRTFSSYAMG

SEQ ID NO: 1162 - protein, 10 aa, Homo sapiens
GRTFGTYAMG

SEQ ID NO: 1163 - protein, 10 aa, Homo sapiens
GRTFGSYAMG

SEQ ID NO: 1164 - protein, 10 aa, Homo sapiens
GRTFGTYALA

SEQ ID NO: 1165 - protein, 10 aa, Homo sapiens
GRAFGSYAMG

SEQ ID NO: 1166 - protein, 10 aa, Homo sapiens
GNIDSIASMG

SEQ ID NO: 1167 - protein, 10 aa, Homo sapiens
GRTFSDYAMG

SEQ ID NO: 1168 - protein, 10 aa, Homo sapiens
GRTFSMYAIG

SEQ ID NO: 1169 - protein, 10 aa, Homo sapiens
ERTFSMYAIG

SEQ ID NO: 1170 - protein, 10 aa, Homo sapiens
GRTFSSYVMG

SEQ ID NO: 1171 - protein, 12 aa, Homo sapiens
GTIFSSGAMAMG

SEQ ID NO: 1172 - protein, 9 aa, Homo sapiens
GTISSGAMG

SEQ ID NO: 1173 - protein, 9 aa, Homo sapiens
TITSDGRTN

SEQ ID NO: 1174 - protein, 9 aa, Homo sapiens
TITTDGRTN

SEQ ID NO: 1175 - protein, 9 aa, Homo sapiens
TITTGGRTN

SEQ ID NO: 1176 - protein, 9 aa, Homo sapiens
TITSGSRTN

SEQ ID NO: 1177 - protein, 9 aa, Homo sapiens
TILSSGSTN

SEQ ID NO: 1178 - protein, 9 aa, Homo sapiens
GITSDGTTY

SEQ ID NO: 1179 - protein, 9 aa, Homo sapiens
GITSGGRTN

SEQ ID NO: 1180 - protein, 9 aa, Homo sapiens
GIRSDGNTN

SEQ ID NO: 1181 - protein, 9 aa, Homo sapiens
GIISDGSTN

SEQ ID NO: 1182 - protein, 9 aa, Homo sapiens
GILSDGTTK

SEQ ID NO: 1183 - protein, 9 aa, Homo sapiens
GLGSGVSTT

SEQ ID NO: 1184 - protein, 9 aa, Homo sapiens
SISTDGSTN

SEQ ID NO: 1185 - protein, 9 aa, Homo sapiens
FITVDHNTY

SEQ ID NO: 1186 - protein, 9 aa, Homo sapiens
AISNGGSAY

SEQ ID NO: 1187 - protein, 9 aa, Homo sapiens
AISSGGSAY

SEQ ID NO: 1188 - protein, 9 aa, Homo sapiens
AISTGGSTY

SEQ ID NO: 1189 - protein, 9 aa, Homo sapiens
AISSGGTTY

SEQ ID NO: 1190 - protein, 9 aa, Homo sapiens
AISSGGSTY

SEQ ID NO: 1191 - protein, 9 aa, Homo sapiens
AISAGGSTL

SEQ ID NO: 1192 - protein, 9 aa, Homo sapiens
AISSGGSTL

SEQ ID NO: 1193 - protein, 9 aa, Homo sapiens
AISSGGITY

SEQ ID NO: 1194 - protein, 9 aa, Homo sapiens
AISVGGSTY

SEQ ID NO: 1195 - protein, 9 aa, Homo sapiens
GISSGGITN

SEQ ID NO: 1196 - protein, 10 aa, Homo sapiens
GISWGGSSTY

SEQ ID NO: 1197 - protein, 9 aa, Homo sapiens
SISSGGSTN

SEQ ID NO: 1198 - protein, 9 aa, Homo sapiens
GISSGGSTN

SEQ ID NO: 1199 - protein, 9 aa, Homo sapiens
AITSGLSTY

SEQ ID NO: 1200 - protein, 9 aa, Homo sapiens
GITGSRTTT

SEQ ID NO: 1201 - protein, 9 aa, Homo sapiens
GITGSRTTM

SEQ ID NO: 1202 - protein, 9 aa, Homo sapiens
NAAPPIFGS

SEQ ID NO: 1203 - protein, 9 aa, Homo sapiens
NAAPPIFNS

SEQ ID NO: 1204 - protein, 9 aa, Homo sapiens
NLAPPIFGS

SEQ ID NO: 1205 - protein, 9 aa, Homo sapiens
NLAPPIFNS

SEQ ID NO: 1206 - protein, 9 aa, Homo sapiens
NAAPPILNS

SEQ ID NO: 1207 - protein, 9 aa, Homo sapiens
NLAPPPEGY

SEQ ID NO: 1208 - protein, 9 aa, Homo sapiens
NFAPPPEGY

SEQ ID NO: 1209 - protein, 11 aa, Homo sapiens
NLWPPRIGFAS

SEQ ID NO: 1210 - protein, 11 aa, Homo sapiens
NTWPPRIAFDS

SEQ ID NO: 1211 - protein, 15 aa, Homo sapiens
NYWPPPLRQGGDYAY

SEQ ID NO: 1212 - protein, 11 aa, Homo sapiens
NAWPPRIGLGS

SEQ ID NO: 1213 - protein, 10 aa, Homo sapiens
NFFPPPVPAS

SEQ ID NO: 1214 - protein, 9 aa, Homo sapiens
NRWPPPYDY

SEQ ID NO: 1215 - protein, 14 aa, Homo sapiens
NFHPPVVRDWGDTY

SEQ ID NO: 1216 - protein, 11 aa, Homo sapiens
NRAPPSTDGDR

SEQ ID NO: 1217 - protein, 17 aa, Homo sapiens
AARRGSAYYTNRIDWPY

SEQ ID NO: 1218 - protein, 17 aa, Homo sapiens
AARRGSAYYTNHVDWPY

SEQ ID NO: 1219 - protein, 17 aa, Homo sapiens
AARTGSAYYTNRIDWPY

SEQ ID NO: 1220 - protein, 17 aa, Homo sapiens
AAKTGSAYYTNRIDWPY

SEQ ID NO: 1221 - protein, 17 aa, Homo sapiens
AARTGGAAYTRRIDWPY

SEQ ID NO: 1222 - protein, 17 aa, Homo sapiens
AARRGSAYYTNHIDWPY

SEQ ID NO: 1223 - protein, 17 aa, Homo sapiens
AARSGGAYYTARVDWPY

SEQ ID NO: 1224 - protein, 17 aa, Homo sapiens
AARSGSAYYTTRVDWPY

SEQ ID NO: 1225 - protein, 17 aa, Homo sapiens
AARRGSAYYTSRIDWPY

SEQ ID NO: 1226 - protein, 17 aa, Homo sapiens
AARSGGAYYTSRVDWPY

SEQ ID NO: 1227 - protein, 16 aa, Homo sapiens
AARLSGVSRSDRPYDY

SEQ ID NO: 1228 - protein, 17 aa, Homo sapiens
AARDGSALYTAHSDWDY

SEQ ID NO: 1229 - protein, 17 aa, Homo sapiens
AARSGSAYFSGRYYWNY

SEQ ID NO: 1230 - protein, 17 aa, Homo sapiens
AAREGGGIWTSSTQYDY

SEQ ID NO: 1231 - protein, 10 aa, Homo sapiens
NLWPPSRPDH

SEQ ID NO: 1232 - protein, 10 aa, Homo sapiens
NLWPPSRPDY

SEQ ID NO: 1233 - protein, 333 aa, Homo sapiens
MESSGNPESTTFFYYDLQSQPCENQAWVFATLATTVLYCLVFLLSLVGNSLVLWVLVKYESLESLTNIFILNLCLSDLVFACLLPVWISPYHWGWVLGDFLCKLLNMIFSISLYSSIFFLTIMTIHRYLSVVSPLSTLRVPTLRCRVLVTMAVWVASILSSILDTIFHKVLSSGCDYSELTWYLTSVYQHNLFFLLSLGIILFCYVEILRTLFRSRSKRRHRTVKLIFAIVVAYFLSWGPYNFTLFLQTLFRTQIIRSCEAKQQLEYALLICRNLAFSHCCFNPVLYVFVGVKFRTHLKHVLRQFWFCRLQAPSPASIPHSPGAFAYEGASFY

SEQ ID NO: 1234 - protein, 450 aa, synthetic construct
  REGION 1..450: note = Synthetic Sequence (muromonab-CD3 heavy chain)
QVQLQQSGAELARPGASVKMSCKASGYTFTRYTMHWVKQRPGQGLEWIGYINPSRGYTNYNQKFKDKATLTTDKSSSTAYMQLSSLTSEDSAVYYCARYYDDHYCLDYWGQGTTLTVSSAKTTAPSVYPLAPVCGGTTGSSVTLGCLVKGYFPEPVTLTWNSGSLSSGVHTFPAVLQSDLYTLSSSVTVTSSTWPSQSITCNVAHPASSTKVDKKIEPRPKSCDKTHTCPPCPAPELLGGPSVFLFPPKPKDTLMISRTPEVTCVVVDVSHEDPEVKFNWYVDGVEVHNAKTKPREEQYNSTYRVVSVLTVLHQDWLNGKEYKCKVSNKALPAPIEKTISKAKGQPREPQVYTLPPSRDELTKNQVSLTCLVKGFYPSDIAVEWESNGQPENNYKTTPPVLDSDGSFFLYSKLTVDKSRWQQGNVFSCSVMHEALHNHYTQKSLSLSPGK

SEQ ID NO: 1235 - protein, 213 aa, synthetic construct
  REGION 1..213: note = Synthetic Sequence (muromonab-CD3 light chain)
QIVLTQSPAIMSASPGEKVTMTCSASSSVSYMNWYQQKSGTSPKRWIYDTSKLASGVPAHFRGSGSGTSYSLTISGMEAEDAATYYCQQWSSNPFTFGSGTKLEINRADTAPTVSIFPPSSEQLTSGGASVVCFLNNFYPKDINVKWKIDGSERQNGVLNSWTDQDSKDSTYSMSSTLTLTKDEYERHNSYTCEATHKTSTSPIVKSFNRNEC

SEQ ID NO: 1236 - protein, 449 aa, synthetic construct
  REGION 1..449: note = Synthetic Sequence (otelixizumab heavy chain)
EVQLLESGGGLVQPGGSLRLSCAASGFTFSSFPMAWVRQAPGKGLEWVSTISTSGGRTYYRDSVKGRFTISRDNSKNTLYLQMNSLRAEDTAVYYCAKFRQYSGGFDYWGQGTLVTVSSASTKGPSVFPLAPSSKSTSGGTAALGCLVKDYFPEPVTVSWNSGALTSGVHTFPAVLQSSGLYSLSSVVTVPSSSLGTQTYICNVNHKPSNTKVDKKVEPKSCDKTHTCPPCPAPELLGGPSVFLFPPKPKDTLMISRTPEVTCVVVDVSHEDPEVKFNWYVDGVEVHNAKTKPREEQYASTYRVVSVLTVLHQDWLNGKEYKCKVSNKALPAPIEKTISKAKGQPREPQVYTLPPSRDELTKNQVSLTCLVKGFYPSDIAVEWESNGQPENNYKTTPPVLDSDGSFFLYSKLTVDKSRWQQGNVFSCSVMHEALHNHYTQKSLSLSPGK

SEQ ID NO: 1237 - protein, 216 aa, synthetic construct
  REGION 1..216: note = Synthetic Sequence (otelixizumab light chain)
DIQLTQPNSVSTSLGSTVKLSCTLSSGNIENNYVHWYQLYEGRSPTTMIYDDDKRPDGVPDRFSGSIDRSSNSAFLTIHNVAIEDEAIYFCHSYVSSFNVFGGGTKLTVLRQPKAAPSVTLFPPSSEELQANKATLVCLISDFYPGAVTVAWKADSSPVKAGVETTTPSKQSNNKYAASSYLSLTPEQWKSHRSYSCQVTHEGSTVEKTVAPTECS

SEQ ID NO: 1238 - protein, 449 aa, synthetic construct
  REGION 1..449: note = Synthetic Sequence (teplizumab heavy chain)
QVQLVQSGGGVVQPGRSLRLSCKASGYTFTRYTMHWVRQAPGKGLEWIGYINPSRGYTNYNQKVKDRFTISRDNSKNTAFLQMDSLRPEDTGVYFCARYYDDHYCLDYWGQGTPVTVSSASTKGPSVFPLAPSSKSTSGGTAALGCLVKDYFPEPVTVSWNSGALTSGVHTFPAVLQSSGLYSLSSVVTVPSSSLGTQTYICNVNHKPSNTKVDKKVEPKSCDKTHTCPPCPAPEAAGGPSVFLFPPKPKDTLMISRTPEVTCVVVDVSHEDPEVKFNWYVDGVEVHNAKTKPREEQYNSTYRVVSVLTVLHQDWLNGKEYKCKVSNKALPAPIEKTISKAKGQPREPQVYTLPPSRDELTKNQVSLTCLVKGFYPSDIAVEWESNGQPENNYKTTPPVLDSDGSFFLYSKLTVDKSRWQQGNVFSCSVMHEALHNHYTQKSLSLSPGK

SEQ ID NO: 1239 - protein, 213 aa, synthetic construct
  REGION 1..213: note = Synthetic Sequence (teplizumab light chain)
DIQMTQSPSSLSASVGDRVTITCSASSSVSYMNWYQQTPGKAPKRWIYDTSKLASGVPSRFSGSGSGTDYTFTISSLQPEDIATYYCQQWSSNPFTFGQGTKLQITRTVAAPSVFIFPPSDEQLKSGTASVVCLLNNFYPREAKVQWKVDNALQSGNSQESVTEQDSKDSTYSLSSTLTLSKADYEKHKVYACEVTHQGLSSPVTKSFNRGEC

SEQ ID NO: 1240 - protein, 120 aa, synthetic construct [sequence omitted]

SEQ ID NO: 1241 - protein, 106 aa, synthetic construct [sequence omitted]

SEQ ID NO: 1242 - protein, 118 aa, synthetic construct [sequence omitted]

SEQ ID NO: 1243 - protein, 118 aa, synthetic construct
  REGION 1..118: note = Synthetic Sequence
QVQLVQSGGGVVQSGRSLRLSCAASGFKFSGYGMHWVRQAPGKGLEWVAVIWYDGSKKYYVDSVKGRFTISRDNSKNTLYLQMNSLRGEDTAVYYCARQMGYWHFDLWGRGTLVTVSS

SEQ ID NO: 1244 - protein, 108 aa, synthetic construct [sequence omitted]

SEQ ID NO: 1245 - protein, 108 aa, synthetic construct [sequence omitted]

SEQ ID NO: 1246 - protein, 125 aa, synthetic construct
  REGION 1..125: note = Synthetic Sequence
EVKLVESGGGLVQPGGSLRLSCAASGFTFNTYAMNWVRQAPGKGLEWVARIRSKYNNYATYYADSVKDRFTISRDDSKSSLYLQMNNLKTEDTAMYYCVRHGNFGNSYVSWFAYWGQGTLVTVSS

SEQ ID NO: 1247 - protein, 125 aa, synthetic construct
  REGION 1..125: note = Synthetic Sequence
EVKLVESGGGLVKPGRSLRLSCAASGFTFNTYAMNWVRQAPGKGLEWVARIRSKYNNYATYYADSVKDRFTISRDDSKSILYLQMNNLKTEDTAMYYCVRHGNFGNSYVSWFAYWGQGTLVTVSS

SEQ ID NO: 1248 - protein, 125 aa, synthetic construct
  REGION 1..125: note = Synthetic Sequence
EVKLVESGGGLVKPGRSLRLSCAASGFTFNTYAMNWVRQAPGKGLEWVARIRSKYNNYATYYADSVKDRFTISRDDSKSILYLQMNSLKTEDTAMYYCVRHGNFGNSYVSWFAYWGQGTLVTVSS

SEQ ID NO: 1249 - protein, 125 aa, synthetic construct
  REGION 1..125: note = Synthetic Sequence
EVKLVESGGGLVKPGRSLRLSCAASGFTFNTYAMNWVRQAPGKGLEWVARIRSKYNNYATYYADSVKDRFTISRDDSKSILYLQMNSLKTEDTAMYYCVRHGNFGNSYVSWFAYWGQGTMVTVSS

SEQ ID NO: 1250 - protein, 109 aa, synthetic construct
  REGION 1..109: note = Synthetic Sequence
QAVVTQEPSFSVSPGGTVTLTCRSSTGAVTTSNYANWVQQTPGQAFRGLIGGTNKRAPGVPARFSGSLIGDKAALTITGAQADDESIYFCALWYSNLWVFGGGTKLTVL

SEQ ID NO: 1251 - protein, 109 aa, synthetic construct
  REGION 1..109: note = Synthetic Sequence
QAVVTQEPSFSVSPGGTVTLTCRSSTGAVTTSNYANWVQQTPGQAFRGLIGGTNKRAPGVPARFSGSILGNKAALTITGAQADDESIYFCALWYSNLWVFGGGTKLTVL

SEQ ID NO: 1252 - protein, 109 aa, synthetic construct
  REGION 1..109: note = Synthetic Sequence
QAVVTQEPSFSVSPGGTVTLTCRSSTGAVTTSNYANWVQQTPGQAFRGLIGGTNKRAPGVPARFSGSILGNKAALTITGAQADDESDYYCALWYSNLWVFGGGTKLTVL

SEQ ID NO: 1253 - protein, 119 aa, synthetic construct
  REGION 1..119: note = Synthetic Sequence
QVQLVQSGSELKKPGASVKMSCKASGYTFTRYTMHWVRQAPGKGLEWIGYINPSRGYTNYNQKFKDRATLTTDKSTSTAYMQLSSLRSEDTAVYYCARYYDDHYSLDYWGQGTLVTVSS

SEQ ID NO: 1254 - protein, 106 aa, synthetic construct
  REGION 1..106: note = Synthetic Sequence
QIVLTQSPATLSLSPGERATMSCSASSSVSYMNWYQQKPGKAPKRWIYDTSKLASGVPSRFRGSGSGTDYTLTISSLQPEDFATYYCQQWSSNPFTFGGGTKVEIK

SEQ ID NO: 1255 - protein, 125 aa, synthetic construct
  REGION 1..125: note = Synthetic Sequence
ELQLVESGGGVVQPGRSLRLSCAASGFTFSSYGMHWVRQAPGKGLEWVAVISYDGSNKYYADSVKGRFTISRDNSKNTLYLQMNSLRSEDTAVYYCARLSPYCTNGVCWDAFDIWGQGTMVTVSS

SEQ ID NO: 1256 - protein, 122 aa, synthetic construct
  REGION 1..122: note = Synthetic Sequence
ELQLVESGGGLVKPGRSLRLSCTASGFTFGDYAMSWFRQAPGKGLEWVGFIRSKAYGGTTEYAASVKGRFTISRDDSKSIAYLQMNSLKTEDTAVYYCTPQLWLLQDAFDIWGQGTMVTVSS

SEQ ID NO: 1257 - protein, 120 aa, synthetic construct
  REGION 1..120: note = Synthetic Sequence
ELQLVESGPGLVKPSGTLSLTCAVSGGSISSRNWWSWVRQPPGKGLEWIGDIYHSGSTNYNPSLKSRVTISVDKSKNQFSLKLSSVTAADTAVYYCASGYTSCRDAFDIWGQGTMVTVSS

SEQ ID NO: 1258 - protein, 126 aa, synthetic construct
  REGION 1..126: note = Synthetic Sequence
ELQLVEWGAGLLKPSETLSLTCAVYGGSFSGYYWSWIRQPPGKGLEWIGEINHSGSTNYNPSLKSRVTISVDTSKNQFSLKLSSVTAADTAVYYCARGRGRFLGWLLGGSNWFDPWGQGTLVTVSS

SEQ ID NO: 1259 - protein, 119 aa, synthetic construct
  REGION 1..119: note = Synthetic Sequence
ELQLVEWGAGLLKPSETLSLTCAVYGGSFSGYYWSWIRQPPGKGLEWIGEINHSGSTNYNPSLKSRVTISVDTSKNQFSLKLSSVTAADTAVYYCARGPDRMGHGFDIWGQGTMVTVSS

SEQ ID NO: 1260 - protein, 127 aa, synthetic construct
  REGION 1..127: note = Synthetic Sequence
ELQLVESGPGLVKPSQTLSLTCAISGDSVSSNSAAWNWIRQSPSRGLEWLGRTYYRSKWYNDYAVSVKSRITINPDTSKNQFSLQLNSVTPEDTAVYYCARDRRRIAARQYYGMDVWGQGTTVTVSS

SEQ ID NO: 1261 - protein, 121 aa, synthetic construct
  REGION 1..121: note = Synthetic Sequence
ELQLVESGGGLVQPGGSLRLSCAASGFTFSSYAMGWVRQAPGKGLEWVSAVSGSGGSTYYADSVKGRFTISRDNSKNTLYLQMNSLRAEDTAVYYCAKAKFLGHYYGMDVWGQGTTVTVSS

SEQ ID NO: 1262 - protein, 123 aa, synthetic construct
  REGION 1..123: note = Synthetic Sequence
ELQLVESGPVLVKPTDTLTLTCTVSGFSLNNPRMGVSWIRQPPGKTLEWLAHIFPSDAKAHSASLKSRLTISKDTSKSQVVPTMTNMDPVDTATYYCARILGEYYPPAWFDPWGQGTLVTVSS

SEQ ID NO: 1263 - protein, 107 aa, synthetic construct
  REGION 1..107: note = Synthetic Sequence
ELQMTQSPSSLSASVGDRVSITCRASQTISNYLNWYQLKPGKAPKLLIYAASTLQSEVPTRFSGSGSGTDFTLTISGLHPEDFATYYCQQFNSYPRTFGQGTKVEIK

SEQ ID NO: 1264 - protein, 107 aa, synthetic construct
  REGION 1..107: note = Synthetic Sequence
ELQMTQSPSSLSASVGDRVTITCRASQGISNYLAWYQQKPGKVPKLLIYAASTLQSGVPSRFSGSGSGTDFTLTISSLQPEDFATYYCQQSYSTPPTFGQGTKLEIK

SEQ ID NO: 1265 - protein, 107 aa, synthetic construct
  REGION 1..107: note = Synthetic Sequence
ELVMTQSPSSLSASVGDRVTITCRASQGIGNYLAWYQQKPGQPPKMLIYWASIRESGVPDRFSGSGSGTDFTLTISSLQAEDVAVYYCQQYYSNPQTFGQGTKVEIK

SEQ ID NO: 1266 - protein, 107 aa, synthetic construct
  REGION 1..107: note = Synthetic Sequence
ELVMTQSPSSLSASVGDRVTITCRASQGISNYLNWYQQKPGKAPKLLIYDASNLETGVPSRFSGSGSGTDFTLTISSLQPEDFATYYCQQSYSTPYTFGQGTKVDIK

SEQ ID NO: 1267 - protein, 107 aa, synthetic construct
  REGION 1..107: note = Synthetic Sequence
ELQMTQSPSSLSASVGDRVTITCRASQSISSYLNWYQQKSGKAPKLLIYAASSLQSGVPSRFSGSGSGTDFTLTISSLQPEDFATYYCQQSYSSPWTFGQGTKVEIK

SEQ ID NO: 1268 - protein, 108 aa, synthetic construct
  REGION 1..108: note = Synthetic Sequence
ELVLTQSPGTLSLSPGERATLSCRASQSVSSNYLAWYQQKPGQAPRLLIYGASSRATGIPDRFSGSGSGTDFTLTISSLQPEDVATYYCQKYNSAPLTFGGGTKVEIK

SEQ ID NO: 1269 - protein, 107 aa, synthetic construct
  REGION 1..107: note = Synthetic Sequence
ELQMTQSPSSLSASVGDRVTITCRASQSISSYLNWYQQKPGKAPKLLIYAASSLQSGVPSRFSGSGSGTEFTLTISSLQPEDFATYYCLQHNAYPYTFGQGTKVEIK

SEQ ID NO: 1270 - protein, 113 aa, synthetic construct
  REGION 1..113: note = Synthetic Sequence
ELVMTQSPDSLAVSLGERATINCKSSQSVLYSSNNKNYLAWYQQKPGQPPKLLIYWASTRESGVPDRFSGSGSGTDFTLTISSLQAEDVAVYYCQQYLKIPYTFGQGTKVEIK

SEQ ID NO: 1271 - protein, 119 aa, synthetic construct
  REGION 1..119: note = Synthetic Sequence
QVQLVQSGAEVKKPGASVKVSCKASGYTFTRYTMHWVRQAPGQGLEWMGYINPSRGYTNYNQKFKDRVTMTTDTSISTAYMELSRLRSDDTAVYYCARYYDDHYCLDYWGQGTLVTVSS

SEQ ID NO: 1272 - protein, 119 aa, synthetic construct
  REGION 1..119: note = Synthetic Sequence
QVQLVQSGAEVKKPGASVKVSCKASGYTFTRYTMHWVRQAPGQGLEWMGYINPSRGYTNYNQKFKDRVTMTTDTSISTAYMELSRLRSDDTAVYYCARYYDDHYSLDYWGQGTLVTVSS

SEQ ID NO: 1273 - protein, 106 aa, synthetic construct
  REGION 1..106: note = Synthetic Sequence
EIVLTQSPATLSLSPGERATLSCSASSSVSYMNWYQQKPGQAPRLLIYDTSKLASGVPAHFRGSGSGTDYTLTISSLEPEDFAVYYCQQWSSNPFTFGQGTKVEIK

SEQ ID NO: 1274 - protein, 125 aa, synthetic construct
  REGION 1..125: note = Synthetic Sequence
EVQLVESGGGLVQPGGSLRLSCAASGFTFSTYAMNWVRQAPGKGLEWVGRIRSKYNNYATYYADSVKDRFTISRDDSKNSLYLQMNSLKTEDTAVYYCARHGNFGNSYVSWFAYWGQGTLVTVSS

SEQ ID NO: 1275 - protein, 125 aa, synthetic construct; identical to SEQ ID NO: 1274
  REGION 1..125: note = Synthetic Sequence

SEQ ID NO: 1276 - protein, 125 aa, synthetic construct
  REGION 1..125: note = Synthetic Sequence
EVQLVESGGGLVQPGGSLRLSCAASGFTFSTYAMNWVRQAPGKGLEWVGRIRSKYNNYATYYADSVKDRFTISRDDSKNSLYLQMNSLKTEDTAVYYCARHGNFGNSYVSYFAYWGQGTLVTVSS

SEQ ID NO: 1277 - protein, 125 aa, synthetic construct
  REGION 1..125: note = Synthetic Sequence
EVQLVESGGGLVQPGGSLRLSCAASGFTFSTYAMNWVRQAPGKGLEWVGRIRSKYNNYATYYADSVKDRFTISRDDSKNSLYLQMNSLKTEDTAVYYCARHGNFGNSYVSHFAYWGQGTLVTVSS

SEQ ID NO: 1278 - protein, 110 aa, synthetic construct
  REGION 1..110: note = Synthetic Sequence
DIQMTQSPSSLSASVGDRVTITCRSSTGAVTTSNYANWVQQKPGKAPKGLIGGTNKRAPGVPSRFSGSLIGDKATLTISSLQPEDFATYYCALWYSNLWVFGQGTKVEIK

SEQ ID NO: 1279 - protein, 110 aa, synthetic construct
  REGION 1..110: note = Synthetic Sequence
DIQMTQSPSSLSASVGDRVTITCRSSTGAVTTSNYANWVQQKPGKAPKGLIGGTNKRAPGVPARFSGSGSGTDFTLTISSLQPEDFATYYCALWYSNLWVFGQGTKVEIK

SEQ ID NO: 1280 - protein, 110 aa, synthetic construct
  REGION 1..110: note = Synthetic Sequence
DIQMTQSPSSLSASVGDRVTITCRSSTGAVTTSNYANWVQQKPGKAPKALIGGTNKRAPGVPSRFSGSLIGDKATLTISSLQPEDFATYYCALWYSNLWVFGQGTKVEIK

SEQ ID NO: 1281 - protein, 110 aa, synthetic construct; identical to SEQ ID NO: 1278
  REGION 1..110: note = Synthetic Sequence

SEQ ID NO: 1282 - skipped

SEQ ID NO: 1283 - protein, 5 aa, synthetic construct
  REGION 1..5: note = Synthetic Sequence (linker sequence)
GGGGS

SEQ ID NO: 1284 - protein, 10 aa, synthetic construct
  REGION 1..10: note = Synthetic Sequence (linker sequence)
GGGGSGGGGS

SEQ ID NO: 1285 - protein, 15 aa, synthetic construct
  REGION 1..15: note = Synthetic Sequence (linker sequence)
GGGGSGGGGSGGGGS

SEQ ID NO: 1286 - protein, 20 aa, synthetic construct
  REGION 1..20: note = Synthetic Sequence (linker sequence)
GGGGSGGGGSGGGGSGGGGS

SEQ ID NO: 1287 - protein, 25 aa, synthetic construct
  REGION 1..25: note = Synthetic Sequence (linker sequence)
GGGGSGGGGSGGGGSGGGGSGGGGS

SEQ ID NO: 1288 - protein, 30 aa, synthetic construct
  REGION 1..30: note = Synthetic Sequence (linker sequence)
GGGGSGGGGSGGGGSGGGGSGGGGSGGGGS

SEQ ID NO: 1289 - protein, 35 aa, synthetic construct
  REGION 1..35: note = Synthetic Sequence (linker sequence)
GGGGSGGGGSGGGGSGGGGSGGGGSGGGGSGGGGS

SEQ ID NO: 1290 - protein, 40 aa, synthetic construct
  REGION 1..40: note = Synthetic Sequence (linker sequence)
GGGGSGGGGSGGGGSGGGGSGGGGSGGGGSGGGGSGGGGS

SEQ ID NO: 1291 - protein, 16 aa, synthetic construct
  REGION 1..16: note = Synthetic Sequence (linker sequence)
GGSGGSGGGGSGGGGS

SEQ ID NO: 1292 - protein, 8 aa, synthetic construct
  REGION 1..8: note = Synthetic Sequence (linker sequence)
GGGGGGGG

SEQ ID NO: 1293 - protein, 6 aa, synthetic construct
  REGION 1..6: note = Synthetic Sequence (linker sequence)
GGGGGG

SEQ ID NO: 1294 - protein, 5 aa, synthetic construct
  REGION 1..5: note = Synthetic Sequence (linker sequence)
EAAAK

SEQ ID NO: 1295 - protein, 10 aa, synthetic construct
  REGION 1..10: note = Synthetic Sequence (linker sequence)
EAAAKEAAAK

SEQ ID NO: 1296 - protein, 15 aa, synthetic construct
  REGION 1..15: note = Synthetic Sequence (linker sequence)
EAAAKEAAAKEAAAK

SEQ ID NO: 1297 - protein, 12 aa, synthetic construct
  REGION 1..12: note = Synthetic Sequence (linker sequence)
AEAAAKEAAAKA

SEQ ID NO: 1298 - protein, 17 aa, synthetic construct
  REGION 1..17: note = Synthetic Sequence (linker sequence)
AEAAAKEAAAKEAAAKA

SEQ ID NO: 1299 - protein, 22 aa, synthetic construct
  REGION 1..22: note = Synthetic Sequence (linker sequence)
AEAAAKEAAAKEAAAKEAAAKA

SEQ ID NO: 1300 - protein, 27 aa, synthetic construct
  REGION 1..27: note = Synthetic Sequence (linker sequence)
AEAAAKEAAAKEAAAKEAAAKEAAAKA

SEQ ID NO: 1301 - protein, 46 aa, synthetic construct
  REGION 1..46: note = Synthetic Sequence (linker sequence)
AEAAAKEAAAKEAAAKEAAAKALEAEAAAKEAAAKEAAAKEAAAKA

SEQ ID NO: 1302 - protein, 5 aa, synthetic construct
  REGION 1..5: note = Synthetic Sequence (linker sequence)
PAPAP

SEQ ID NO: 1303 - protein, 18 aa, synthetic construct
  REGION 1..18: note = Synthetic Sequence (linker sequence)
KESGSVSSEQLAQFRSLD

SEQ ID NO: 1304 - protein, 14 aa, synthetic construct
  REGION 1..14: note = Synthetic Sequence (linker sequence)
EGKSSGSGSESKST

SEQ ID NO: 1305 - protein, 12 aa, synthetic construct
  REGION 1..12: note = Synthetic Sequence (linker sequence)
GSAGSAAGSGEF

SEQ ID NO: 1306 - protein, 6 aa, synthetic construct
  REGION 1..6: note = Synthetic Sequence (linker sequence)
GGSGGS

SEQ ID NO: 1307 - protein, 9 aa, synthetic construct
  REGION 1..9: note = Synthetic Sequence (linker sequence)
GGSGGSGGS

SEQ ID NO: 1308 - protein, 12 aa, synthetic construct
  REGION 1..12: note = Synthetic Sequence (linker sequence)
GGSGGSGGSGGS

SEQ ID NO: 1309 - protein, 15 aa, synthetic construct
  REGION 1..15: note = Synthetic Sequence (linker sequence)
GGSGGSGGSGGSGGS

SEQ ID NO: 1310 - protein, 18 aa, synthetic construct
  REGION 1..18: note = Synthetic Sequence (linker sequence)
GGSGGSGGSGGSGGSGGS

SEQ ID NO: 1311 - protein, 21 aa, synthetic construct
  REGION 1..21: note = Synthetic Sequence (linker sequence)
GGSGGSGGSGGSGGSGGSGGS

SEQ ID NO: 1312 - protein, 24 aa, synthetic construct
  REGION 1..24: note = Synthetic Sequence (linker sequence)
GGSGGSGGSGGSGGSGGSGGSGGS

SEQ ID NO: 1313 - protein, 27 aa, synthetic construct
  REGION 1..27: note = Synthetic Sequence (linker sequence)
GGSGGSGGSGGSGGSGGSGGSGGSGGS

SEQ ID NO: 1314 - protein, 30 aa, synthetic construct
  REGION 1..30: note = Synthetic Sequence (linker sequence)
GGSGGSGGSGGSGGSGGSGGSGGSGGSGGS

SEQ ID NO: 1315 - protein, 33 aa, synthetic construct
  REGION 1..33: note = Synthetic Sequence (linker sequence)
GGSGGSGGSGGSGGSGGSGGSGGSGGSGGSGGS

SEQ ID NO: 1316 - protein, 36 aa, synthetic construct
  REGION 1..36: note = Synthetic Sequence (linker sequence)
GGSGGSGGSGGSGGSGGSGGSGGSGGSGGSGGSGGS

SEQ ID NO: 1317 - protein, 39 aa, synthetic construct
  REGION 1..39: note = Synthetic Sequence (linker sequence)
GGSGGSGGSGGSGGSGGSGGSGGSGGSGGSGGSGGSGGS

SEQ ID NO: 1318 - protein, 42 aa, synthetic construct
  REGION 1..42: note = Synthetic Sequence (linker sequence)
GGSGGSGGSGGSGGSGGSGGSGGSGGSGGSGGSGGSGGSGGS

SEQ ID NO: 1319 - protein, 45 aa, synthetic construct
  REGION 1..45: note = Synthetic Sequence (linker sequence)
GGSGGSGGSGGSGGSGGSGGSGGSGGSGGSGGSGGSGGSGGSGGS

SEQ ID NO: 1320 - protein, 48 aa, synthetic construct
  REGION 1..48: note = Synthetic Sequence (linker sequence)
GGSGGSGGSGGSGGSGGSGGSGGSGGSGGSGGSGGSGGSGGSGGSGGS

SEQ ID NO: 1321 - protein, 51 aa, synthetic construct
  REGION 1..51: note = Synthetic Sequence (linker sequence)
GGSGGSGGSGGSGGSGGSGGSGGSGGSGGSGGSGGSGGSGGSGGSGGSGGS

SEQ ID NO: 1322 - protein, 54 aa, synthetic construct
  REGION 1..54: note = Synthetic Sequence (linker sequence)
GGSGGSGGSGGSGGSGGSGGSGGSGGSGGSGGSGGSGGSGGSGGSGGSGGSGGS

SEQ ID NO: 1323 - protein, 57 aa, synthetic construct
  REGION 1..57: note = Synthetic Sequence (linker sequence)
GGSGGSGGSGGSGGSGGSGGSGGSGGSGGSGGSGGSGGSGGSGGSGGSGGSGGSGGS

SEQ ID NO: 1324 - protein, 60 aa, synthetic construct
  REGION 1..60: note = Synthetic Sequence (linker sequence)
GGSGGSGGSGGSGGSGGSGGSGGSGGSGGSGGSGGSGGSGGSGGSGGSGGSGGSGGSGGS

SEQ ID NO: 1325 - protein, 45 aa, synthetic construct
  REGION 1..45: note = Synthetic Sequence (linker sequence)
GGGGSGGGGSGGGGSGGGGSGGGGSGGGGSGGGGSGGGGSGGGGS

SEQ ID NO: 1326 - protein, 50 aa, synthetic construct
  REGION 1..50: note = Synthetic Sequence (linker sequence)
GGGGSGGGGSGGGGSGGGGSGGGGSGGGGSGGGGSGGGGSGGGGSGGGGS

SEQ ID NO: 1327 - protein, 55 aa, synthetic construct
  REGION 1..55: note = Synthetic Sequence (linker sequence)
GGGGSGGGGSGGGGSGGGGSGGGGSGGGGSGGGGSGGGGSGGGGSGGGGSGGGGS

SEQ ID NO: 1328 - protein, 60 aa, synthetic construct
  REGION 1..60: note = Synthetic Sequence (linker sequence)
GGGGSGGGGSGGGGSGGGGSGGGGSGGGGSGGGGSGGGGSGGGGSGGGGSGGGGSGGGGS

SEQ ID NO: 1329 - protein, 65 aa, synthetic construct
  REGION 1..65: note = Synthetic Sequence (linker sequence)
GGGGSGGGGSGGGGSGGGGSGGGGSGGGGSGGGGSGGGGSGGGGSGGGGSGGGGSGGGGSGGGGS

SEQ ID NO: 1330 - protein, 70 aa, synthetic construct
  REGION 1..70: note = Synthetic Sequence (linker sequence)
GGGGSGGGGSGGGGSGGGGSGGGGSGGGGSGGGGSGGGGSGGGGSGGGGSGGGGSGGGGSGGGGSGGGGS

SEQ ID NO: 1331 - protein, 75 aa, synthetic construct
  REGION 1..75: note = Synthetic Sequence (linker sequence)
GGGGSGGGGSGGGGSGGGGSGGGGSGGGGSGGGGSGGGGSGGGGSGGGGSGGGGSGGGGSGGGGSGGGGSGGGGS

SEQ ID NO: 1332 - protein, 80 aa, synthetic construct
  REGION 1..80: note = Synthetic Sequence (linker sequence)
GGGGSGGGGSGGGGSGGGGSGGGGSGGGGSGGGGSGGGGSGGGGSGGGGSGGGGSGGGGSGGGGSGGGGSGGGGSGGGGS

SEQ ID NO: 1333 - protein, 85 aa, synthetic construct
  REGION 1..85: note = Synthetic Sequence (linker sequence)
GGGGSGGGGSGGGGSGGGGSGGGGSGGGGSGGGGSGGGGSGGGGSGGGGSGGGGSGGGGSGGGGSGGGGSGGGGSGGGGSGGGGS

SEQ ID NO: 1334 - protein, 90 aa, synthetic construct
  REGION 1..90: note = Synthetic Sequence (linker sequence)
GGGGSGGGGSGGGGSGGGGSGGGGSGGGGSGGGGSGGGGSGGGGSGGGGSGGGGSGGGGSGGGGSGGGGSGGGGSGGGGSGGGGSGGGGS

SEQ ID NO: 1335 - protein, 95 aa, synthetic construct
  REGION 1..95: note = Synthetic Sequence (linker sequence)
GGGGSGGGGSGGGGSGGGGSGGGGSGGGGSGGGGSGGGGSGGGGSGGGGSGGGGSGGGGSGGGGSGGGGSGGGGSGGGGSGGGGSGGGGSGGGGS

SEQ ID NO: 1336 - protein, 100 aa, synthetic construct
  REGION 1..100: note = Synthetic Sequence (linker sequence)
GGGGSGGGGSGGGGSGGGGSGGGGSGGGGSGGGGSGGGGSGGGGSGGGGSGGGGSGGGGSGGGGSGGGGSGGGGSGGGGSGGGGSGGGGSGGGGSGGGGS

SEQ ID NO: 1337 - protein, 5 aa, synthetic construct
  REGION 1..5: note = Synthetic Sequence (linker sequence)
GGGSE

SEQ ID NO: 1338 - protein, 5 aa, synthetic construct
  REGION 1..5: note = Synthetic Sequence (linker sequence)
GSESG

SEQ ID NO: 1339 - protein, 5 aa, synthetic construct
  REGION 1..5: note = Synthetic Sequence (linker sequence)
GSEGS

SEQ ID NO: 1340 - protein, 35 aa, synthetic construct
  REGION 1..35: note = Synthetic Sequence (linker sequence)
GEGGSGEGSSGEGSSSEGGGSEGGGSEGGGSEGGS

SEQ ID NO: 1341 - protein, 4 aa, synthetic construct
  REGION 1..4: note = Synthetic Sequence
CPPC

SEQ ID NO: 1342 - protein, 9 aa, synthetic construct
  REGION 1..9: note = Synthetic Sequence
DKTHTCPPC

SEQ ID NO: 1343 - protein, 14 aa, synthetic construct
  REGION 1..14: note = Synthetic Sequence
EPKSCDKTHTCPPC

SEQ ID NO: 1344 - protein, 14 aa, synthetic construct
  REGION 1..14: note = Synthetic Sequence
EPKSSDKTHTCPPC

SEQ ID NO: 1345 - skipped

SEQ ID NO: 1346 - protein, 297 aa, synthetic construct
  REGION 1..297: note = Synthetic Sequence
MTTPRNSVNGTFPAEPMKGPIAMQSGPKPLFRRMSSLVGPTQSFFMRESKTLGAVQIMNGLFHIALGGLLMIPAGIYAPICVTVWYPLWGGIMYIISGSLLAATEKNSRKCLVKGKMIMNSLSLFAAISGMILSIMDILNIKISHFLKMESLNFIRAHTPYINIYNCEPANPSEKNSPSTQYCYSIQSLFLGILSVMLIFAFFQELVIAGIVENEWKRTCSRPKSNIVLLSAEEKKEQTIEIKEEVVGLTETSSQPKNEEDIEIIPIQEEEEEETETNFPEPPQDQESSPIENDSSP

SEQ ID NO: 1347 - protein, 10 aa, synthetic construct
  REGION 1..10: note = Synthetic Sequence
GRTFSRQSMG

SEQ ID NO: 1348 - protein, 10 aa, synthetic construct
  REGION 1..10: note = Synthetic Sequence
GRTFSGQSMG

SEQ ID NO: 1349 - protein, 10 aa, synthetic construct
  REGION 1..10: note = Synthetic Sequence
GRTFSSYAMG

SEQ ID NO: 1350 - protein, 10 aa, synthetic construct
  REGION 1..10: note = Synthetic Sequence
GRTFSSYNMG

SEQ ID NO: 1351 - protein, 10 aa, synthetic construct
  REGION 1..10: note = Synthetic Sequence
GRTFSNYNMG

SEQ ID NO: 1352 - protein, 10 aa, synthetic construct
  REGION 1..10: note = Synthetic Sequence
GRTFSNSNMG

SEQ ID NO: 1353 - protein, 10 aa, synthetic construct
  REGION 1..10: note = Synthetic Sequence
GRSFSSVNMG

SEQ ID NO: 1354 - protein, 7 aa, synthetic construct
  REGION 1..7: note = Synthetic Sequence
GRTFSMG

SEQ ID NO: 1355 - protein, 10 aa, synthetic construct
  REGION 1..10: note = Synthetic Sequence
GRTVGSYSMG

SEQ ID NO: 1356 - protein, 10 aa, synthetic construct
  REGION 1..10: note = Synthetic Sequence
RFTLDYYAIG

SEQ ID NO: 1357 - protein, 10 aa, synthetic construct
  REGION 1..10: note = Synthetic Sequence
GFTLDYYAIG

SEQ ID NO: 1358 - protein, 10 aa, synthetic construct
  REGION 1..10: note = Synthetic Sequence
GRDFATYSMA

SEQ ID NO: 1359 - protein, 10 aa, synthetic construct
  REGION 1..10: note = Synthetic Sequence
GRDFATYSMT

SEQ ID NO: 1360 - protein, 10 aa, synthetic construct
  REGION 1..10: note = Synthetic Sequence
GRDFSTYSMG

SEQ ID NO: 1361 - protein, 10 aa, synthetic construct
  REGION 1..10: note = Synthetic Sequence
GRTFNTYSMG

SEQ ID NO: 1362 - protein, 10 aa, synthetic construct
  REGION 1..10: note = Synthetic Sequence
GRTFSTYSMG

SEQ ID NO: 1363 - protein, 10 aa, synthetic construct
  REGION 1..10: note = Synthetic Sequence
GRDFSTYSMG

SEQ ID NO: 1364 - protein, 10 aa, synthetic construct
  REGION 1..10: note = Synthetic Sequence
GNTFDTRAMG

SEQ ID NO: 1365 - protein, 10 aa, synthetic construct
  REGION 1..10: note = Synthetic Sequence
GRTRDANAMG

SEQ ID NO: 1366 - protein, 10 aa, synthetic construct
  REGION 1..10: note = Synthetic Sequence
GSTFSIKAMG

SEQ ID NO: 1367 - protein, 17 aa, synthetic construct
  REGION 1..17: note = Synthetic Sequence
VITWSGGSPYYADSVRG

SEQ ID NO: 1368 - protein, 17 aa, synthetic construct
  REGION 1..17: note = Synthetic Sequence
VITWSGGSPYYADSVKG

SEQ ID NO: 1369 - protein, 17 aa, synthetic construct
  REGION 1..17: note = Synthetic Sequence
VISWSGGSPYYADSVKG

SEQ ID NO: 1370 - protein, 17 aa, synthetic construct
  REGION 1..17: note = Synthetic Sequence
AIDWSGGSPYYAASVRG

SEQ ID NO: 1371 - protein, 17 aa, synthetic construct
  REGION 1..17: note = Synthetic Sequence
VIDWSGGSPYYTDSVRG

SEQ ID NO: 1372 - protein, 17 aa, synthetic construct
  REGION 1..17: note = Synthetic Sequence
AITYSGGSPYYASSVRG

SEQ ID NO: 1373 - protein, 17 aa, synthetic construct
  REGION 1..17: note = Synthetic Sequence
AVIWSGASPYYADSVKG

SEQ ID NO: 1374 - protein, 17 aa, synthetic construct
  REGION 1..17: note = Synthetic Sequence
AVTWSGASPYYADSVKG

SEQ ID NO: 1375 - protein, 17 aa, synthetic construct
  REGION 1..17: note = Synthetic Sequence
AVTRSGASPYYADSVKG

SEQ ID NO: 1376 - protein, 17 aa, synthetic construct
  REGION 1..17: note = Synthetic Sequence
CISSSGGSTNYADSVKG

SEQ ID NO: 1377 - protein, 17 aa, synthetic construct
  REGION 1..17: note = Synthetic Sequence
TISWSGQRTRYADSVKG

SEQ ID NO: 1378 - protein, 17 aa, synthetic construct
  REGION 1..17: note = Synthetic Sequence
SISWSGQRSRYADSVKG

SEQ ID NO: 1379 - protein, 17 aa, synthetic construct
  REGION 1..17: note = Synthetic Sequence
IISWSGQRTRYADSVKG

SEQ ID NO: 1380 - protein, 17 aa, synthetic construct
  REGION 1..17: note = Synthetic Sequence
AISRSSFNTYYSDSVTG

SEQ ID NO: 1381 - protein, 17 aa, synthetic construct
  REGION 1..17: note = Synthetic Sequence
AISWSGSRTYYADSVKG

SEQ ID NO: 1382 - protein, 17 aa, synthetic construct
  REGION 1..17: note = Synthetic Sequence
AFISGRGSTKYADSVKG

SEQ ID NO: 1383 - protein, 17 aa, synthetic construct
  REGION 1..17: note = Synthetic Sequence
GFISGRGSAKYADSVKG

SEQ ID NO: 1384 - protein, 12 aa, synthetic construct
  REGION 1..12: note = Synthetic Sequence
PVSYGSQWLADY

SEQ ID NO: 1385 - protein, 12 aa, synthetic construct
  REGION 1..12: note = Synthetic Sequence
PVSYGSSWLADY

SEQ ID NO: 1386 - protein, 12 aa, synthetic construct
  REGION 1..12: note = Synthetic Sequence
PLSYGSTWLADY

SEQ ID NO: 1387 - protein, 12 aa, synthetic construct
  REGION 1..12: note = Synthetic Sequence
GVSFGSRWLSDY

SEQ ID NO: 1388 - protein, 12 aa, synthetic construct
  REGION 1..12: note = Synthetic Sequence
GVSYGSRWLGDY

SEQ ID NO: 1389 - protein, 12 aa, synthetic construct
  REGION 1..12: note = Synthetic Sequence
NPTYGSDWNAEN

SEQ ID NO: 1390 - protein, 12 aa, synthetic construct
  REGION 1..12: note = Synthetic Sequence
NPTYSGGWHAEY

SEQ ID NO: 1391 - protein, 20 aa, synthetic construct
  REGION 1..20: note = Synthetic Sequence
ERTWVSNYYCSGDGDGYDYD

SEQ ID NO: 1392 - protein, 14 aa, synthetic construct
  REGION 1..14: note = Synthetic Sequence
PRTWGEFPPTQYDS

SEQ ID NO: 1393 - protein, 13 aa, synthetic construct
  REGION 1..13: note = Synthetic Sequence
GKYGMKWRDGADY

SEQ ID NO: 1394 - protein, 13 aa, synthetic construct
  REGION 1..13: note = Synthetic Sequence
DRSIEVQIADYDY

SEQ ID NO: 1395 - protein, 12 aa, synthetic construct
  REGION 1..12: note = Synthetic Sequence
VLPTGGGSAMDY

SEQ ID NO: 1396 - protein, 12 aa, synthetic construct
  REGION 1..12: note = Synthetic Sequence
VLTTGGGSAMDY

SEQ ID NO: 1397 - protein, 140 aa, synthetic construct
  REGION 1..140: note = Synthetic Sequence
QVQLQESGGGLVQAGGSLRLSCAASGRTFSRQSMGWFRQAPGKEREFVAVITWSGGSPYYADSVRGRFTISRDNAKNTVYLQMNSLKPEDTAVYYCAAPVSYGSQWLADYWGQGTQVTVSSAAAYPYDVPDYGSHHHHHH

SEQ ID NO: 1398 - protein, 140 aa, synthetic construct
  REGION 1..140: note = Synthetic Sequence
QVQLQESGGGLVQAGDSLRLSCAASGRTFSRQSMGWFRQAPGKEREFVAVITWSGGSPYYADSVKGRFTISRDNAKNTVYLQMNSLKPEDTAVYYCAAPVSYGSQWLADYWGQGTQVTVSSAAAYPYDVPDYGSHHHHHH

SEQ ID NO: 1399 - protein, 140 aa, synthetic construct
  REGION 1..140: note = Synthetic Sequence
QVQLQESGGGLVQAGGSLRLSCAASGRTFSGQSMGWFRQAPGKEREFVAVITWSGGSPYYADSVRGRFTISRDNAKNTVHLQMNSLKPEDTAVYYCAAPVSYGSQWLADYWGQGTQVTVSSAAAYPYDVPDYGSHHHHHH

SEQ ID NO: 1400 - protein, 140 aa, synthetic construct
  REGION 1..140: note = Synthetic Sequence
QVQLQESGGGLVQAGGSLRLSCAASGRTFSSYAMGWFRQAPGKEREFVAVITWSGGSPYYADSVRGRFTISRDNAKNTVYLQMNSLKPEDTAVYYCAAPVSYGSQWLADYWGQGTQVTVSSAAAYPYDVPDYGSHHHHHH

SEQ ID NO: 1401 - protein, 140 aa, synthetic construct
  REGION 1..140: note = Synthetic Sequence
QVQLQESGGGLVQAGGSLRLSCAASGRTFSRQSMGWFRQAPGEEREFVAVITWSGGSPYYADSVRGRFTISRDNAKNTVYLQMNSLKPEDTAVYYCAAPVSYGSQWLADYWGQGTQVTVSSAAAYPYDVPDYGSHHHHHH

SEQ ID NO: 1402 - protein, 140 aa, synthetic construct
  REGION 1..140: note = Synthetic Sequence
QVQLQESGGGLVQAGGSLRLSCAASGRTFSSYNMGWFRQAPGKEREFVAVISWSGGSPYYADSVKGRFTISRDNAKNTVYLQMNSLKPEDTAVYYCAAPVSYGSSWLADYWGQGTQVTVSSAAAYPYDVPDYGSHHHHHH

SEQ ID NO: 1403 - protein, 140 aa, synthetic construct
  REGION 1..140: note = Synthetic Sequence
QVQLQESGGGLVQAGGSLRLSCAASGRTFSNYNMGWFRQAPGKEREFVAAIDWSGGSPYYAASVRGRFTISRDNAENTVYLQMNSLKPEDTAVYYCAAPLSYGSTWLADYWGQGTQVTVSSAAAYPYDVPDYGSHHHHHH

SEQ ID NO: 1404 - protein, 140 aa, synthetic construct
  REGION 1..140: note = Synthetic Sequence
QVQLQESGGGLVQAGGSLRLSCAASGRTFSNSNMGWFRQAPGKEREFVAVIDWSGGSPYYTDSVRGRFTISRDNAKNTVYLQMNRLKPEDTAVYYCAGGVSFGSRWLSDYWGQGTQVTVSSAAAYPYDVPDYGSHHHHHH

SEQ ID NO: 1405 - protein, 140 aa, synthetic construct
  REGION 1..140: note = Synthetic Sequence
QVQLQESGGGLVQAGGSLRLSCAASGRSFSSVNMGWFRQAPGKEREFVAVIDWSGGSPYYTDSVRGRFTISRDNSKNTVYLQMNSLKPEDTAVYYCAAGVSYGSRWLGDYWGQGTQVTVSSAAAYPYDVPDYGSHHHHHH

SEQ ID NO: 1406 - protein, 137 aa, synthetic construct
  REGION 1..137: note = Synthetic Sequence
QVQLQESGGGLAQAGGSLRLSCAASGRTFSMGWFRQAPGKEREFVAAITYSGGSPYYASSVRGRFTISRDNAKNTVYLQMNSLKPEDTAVYYCAANPTYGSDWNAENWGQGTQVTVSSAAAYPYDVPDYGSHHHHHH

SEQ ID NO: 1407 - protein, 137 aa, synthetic construct
  REGION 1..137: note = Synthetic Sequence
QVQLQESGGGLVQPGGSLRLSCAASGRTFSMGWFRQAPGKEREFVAAITYSGGSPYYASSVRGRFTISRDNAKNTVYLQMNSLKPEDTAVYYCAANPTYGSDWNAENWGQGTQVTVSSAAAYPYDVPDYGSHHHHHH

SEQ ID NO: 1408 - protein, 140 aa, synthetic construct
  REGION 1..140: note = Synthetic Sequence
QVQLQESGGGLVQAGGSLRLSCAASGRTVGSYSMGWFRQAPGKEREFVAAVIWSGASPYYADSVKGRFTISRDNAKNTVYLQMNSLKPEDTAVYYCAANPTYSGGWHAEYWGQGTQVTVSSAAAYPYDVPDYGSHHHHHH

SEQ ID NO: 1409 - protein, 140 aa, synthetic construct
  REGION 1..140: note = Synthetic Sequence
QVQLQESGGGLVQAGGSLRLSCAASGRTVGSYSMGWFRQAPGKEREFVAAVTWSGASPYYADSVKGRFTISRDNAKNTVYLQMNSLKPEDTAVYYCAANPTYSGGWHAEYWGQGTQVTVSSAAAYPYDVPDYGSHHHHHH

SEQ ID NO: 1410 - protein, 140 aa, synthetic construct
  REGION 1..140: note = Synthetic Sequence
QVQLQESGGGLVQAGDSLRLSCAASGRTVGSYSMGWFRQAPGKEREFVAAVTWSGASPYYADSVKGRFTISRDNAKNTVYLQMNSLKPEDTAVYYCAANPTYSGGWHAEYWGQGTQVTVSSAAAYPYDVPDYGSHHHHHH

SEQ ID NO: 1411 - protein, 140 aa, synthetic construct
  REGION 1..140: note = Synthetic Sequence
QVQLQESGGGSEQPGGSLRLSCAASGRTVGSYSMGWFRQAPGKEREFVAAVTRSGASPYYADSVKGRFTISRDNAKNTVYLQMNSLKPEDTAVYYCAANPTYSGGWHAEYWGQGTQVTVSSAAAYPYDVPDYGSHHHHHH

SEQ ID NO: 1412 - protein, 140 aa, synthetic construct
  REGION 1..140: note = Synthetic Sequence
QVQLQESGGGLVQPGGSLRLSCAASRFTLDYYAIGWFRQAPGKEREFVAAVTWSGASPYYADSVKGRFTISRDNAKNTVYLQMNSLKPEDTAVYYCAANPTYSGGWHAEYWGQGTQVTVSSAAAYPYDVPDYGSHHHHHH

SEQ ID NO: 1413 - protein, 149 aa, synthetic construct
  REGION 1..149: note = Synthetic Sequence
QVQLQESGGGLVQPGGSLRLSCTASGFTLDYYAIGWLRQAPGKEREGVSCISSSGGSTNYADSVKGRFTISRDNAKNTVYLLMNSLKPEDTAVYYCAAERTWVSNYYCSGDGDGYDYDYWGQGTQVTVSSAAAYPYDVPDYGSHHHHHH

SEQ ID NO: 1414 - protein, 142 aa, synthetic construct
  REGION 1..142: note = Synthetic Sequence
QVQLQESGGGLVQAGGSLRLSCAASGRDFATYSMAWFRQAPGKERESVATISWSGQRTRYADSVKGRFTISRDNAKNTVYLQMNSLKPEDTAVYYCAMPRTWGEFPPTQYDSWGQGTQVTVSSAAAYPYDVPDYGSHHHHHH

SEQ ID NO: 1415 - protein, 142 aa, synthetic construct
  REGION 1..142: note = Synthetic Sequence
QVQLQESGGGLVQAGGSLRLSCAASGRDFATYSMAWFRQAPGKERESVATISWSGQRTRYADSVKGRFTISRDNAKNTVYLQMNSLKPEDTAVYYCAAPRTWGEFPPTQYDSWGQGTQVTVSSAAAYPYDVPDYGSHHHHHH

SEQ ID NO: 1416 - protein, 142 aa, synthetic construct
  REGION 1..142: note = Synthetic Sequence
QVQLQESGGGLVPAGGSLRLSCAASGRDFATYSMAWFRQAPGKERESVATISWSGQRTRYADSVKGRFTISRDNAKNTVYLQMNSLKPEDTAVYYCAAPRTWGEFPPTQYDSWGQGTQVTVSSAAAYPYDVPDYGSHHHHHH

SEQ ID NO: 1417 - protein, 142 aa, synthetic construct
  REGION 1..142: note = Synthetic Sequence
QVQLQESGGGLVQAGDSLRLSCAASGRDFATYSMAWFRQAPGKERESVATISWSGQRTRYADSVKGRFTISRDNAKNTVYLQMNSLKPEDTAVYYCAAPRTWGEFPPTQYDSWGQGTQVTVSSAAAYPYDVPDYGSHHHHHH

SEQ ID NO: 1418 - protein, 142 aa, synthetic construct
  REGION 1..142: note = Synthetic Sequence
QVQLQESGGGLVQAGGSLRLSCAASGRDFATYSMAWFRQAPGEERESVATISWSGQRTRYADSVKGRFTISRDNAKNTVYLQMNSLKPEDTAVYYCAAPRTWGEFPPTQYDSWGQGTQVTVSSAAAYPYDVPDYGSHHHHHH

SEQ ID NO: 1419 - protein, 142 aa, synthetic construct
  REGION 1..142: note = Synthetic Sequence
QVQLQESGGGLVQPGGSLRLSCAASGRDFATYSMAWFRQAPGKERESVATISWSGQRTRYADSVKGRFTISRDNAKNTVYLQMNSLKPEDTAVYYCAAPRTWGEFPPTQYDSWGQGTQVTVSSAAAYPYDVPDYGSHHHHHH

SEQ ID NO: 1420 - protein, 142 aa, synthetic construct
  REGION 1..142: note = Synthetic Sequence
QVQLQESGGGLVQPGGSLRLSCATSGRDFATYSMAWFRQAPGKERESVATISWSGQRTRYADSVKGRFTISRDNAKNTVYLQMNSLKPEDTAVYYCAAPRTWGEFPPTQYDSWGQGTQVTVSSAAAYPYDVPDYGSHHHHHH

SEQ ID NO: 1421 - protein, 142 aa, synthetic construct
  REGION 1..142: note = Synthetic Sequence
QVQLQESGGGLVQAGGSLRLSCAASGRDFATYSMTWFRQAPGKERESVATISWSGQRTRYADSVKGRFTISRDNAKNTVYLQMNSLRPEDTAVYYCAAPRTWGEFPPTQYDSWGQGTQVTVSSAAAYPYDVPDYGSHHHHHH

SEQ ID NO: 1422 - protein, 142 aa, synthetic construct
  REGION 1..142: note = Synthetic Sequence
QVQLQESGGGLVQAGDSLRLSCAASGRDFSTYSMGWFRQAPGKERESVATISWSGQRTRYADSVKGRFTISRDNAKNTVYLQMNSLKPEDTAVYYCAAPRTWGEFPPTQYDSWGQGTQVTVSSAAAYPYDVPDYGSHHHHHH

SEQ ID NO: 1423 - protein, 142 aa, synthetic construct
  REGION 1..142: note = Synthetic Sequence
QVQLQESGGGLVQAGGSLRLSCVASGRTFNTYSMGWFRQAPGKEREFVASISWSGQRSRYADSVKGRFTISRDNAKNTVYLQMNSLKPEDTAVYYCASPRTWGEFPPTQYDSWGQGTQVTVSSAAAYPYDVPDYGSHHHHHH

SEQ ID NO: 1424 - protein, 142 aa, synthetic construct
  REGION 1..142: note = Synthetic Sequence
QVQLQESGGGLVQAGGSLRLSCAASGRTFSTYSMGWFRQAPGKEREFVAIISWSGQRTRYADSVKGRFTISRDNAKNTVYLQMNSLKPEDTAVYYCAAPRTWGEFPPTQYDSWGQGTQVTVSSAAAYPYDVPDYGSHHHHHH

SEQ ID NO: 1425 - protein, 142 aa, synthetic construct
  REGION 1..142: note = Synthetic Sequence
QVQLQESGGGSVQTGGSLRLSCAASGRDFSTYSMGWFRQAPGKERESVATISWSGQRTRYADSVKGRFTISRDNAKNTVYLQMNSLKPEDTAVYYCAAPRTWGEFPPTQYDSWGQGTQVTVSSAAAYPYDVPDYGSHHHHHH

SEQ ID NO: 1426 - protein, 141 aa, synthetic construct
  REGION 1..141: note = Synthetic Sequence
QVQLQESGGGLAQAGNSLRISCVASGNTFDTRAMGWFRQAPGKEREFVAAISRSSFNTYYSDSVTGRFTISRDNAKNTVYLQMNSLKPEDTAVYYCAAGKYGMKWRDGADYWGQGTQVTVSSAAAYPYDVPDYGSHHHHHH

SEQ ID NO: 1427 - protein, 141 aa, synthetic construct
  REGION 1..141: note = Synthetic Sequence
QVQLQESGGGLAQAGNSLRISCVASGNTFDTRAMGWFRQAPGKEREFVAAISRSSFNTYYSDSVTGRFTISRDNAKNTVYLQMNSLKPEDTAVYYCVAGKYGMKWRDGADYWGQGTQVTVSSAAAYPYDVPDYGSHHHHHH

SEQ ID NO: 1428 - protein, 141 aa, synthetic construct
  REGION 1..141: note = Synthetic Sequence
QVQLQESGGGLVQAGESLRISCVASGNTFDTRAMGWFRQAPGKEREFVAAISRSSFNTYYSDSVTGRFTISRDNAKNTVYLQMNSLKPEDTAVYYCVAGKYGMKWRDGADYWGQGTQVTVSSAAAYPYDVPDYGSHHHHHH

SEQ ID NO: 1429 - protein, 141 aa, synthetic construct
  REGION 1..141: note = Synthetic Sequence
QVQLQESGGGLAQEGGSLRLSCVASGNTFDTRAMGWFRQAPGKEREFVAAISRSSFNTYYSDSVTGRFTISRDNAKNMVYLQMNSLKPEDTAVYYCAAGKYGMKWRDGADYWGQGTQVTVSSAAAYPYDVPDYGSHHHHHH

SEQ ID NO: 1430 - protein, 141 aa, synthetic construct
  REGION 1..141: note = Synthetic Sequence
QVQLQESGGGLVQTGGSLRLSCAASGNTFDTRAMGWFRQAPGKEREFVAAISRSSFNTYYSDSVTGRFTISRDNAKNTVYLQMNSLKPEDTAVYYCAAGKYGMKWRDGADYWGQGTQVTVSSAAAYPYDVPDYGSHHHHHH

SEQ ID NO: 1431 - protein, 141 aa, synthetic construct
  REGION 1..141: note = Synthetic Sequence
QVQLQESGGGSVQTGGTLTLSCVASGNTFDTRAMGWFRQAPGEEREFVAAISRSSFNTYYSDSVTGRFTISRDNAKNTVYLQMNSLKPEDTAVYYCAAGKYGMKWRDGADYWGQGTQVTVSSAAAYPYDVPDYGSHHHHHH

SEQ ID NO: 1432 - protein, 141 aa, synthetic construct
  REGION 1..141: note = Synthetic Sequence
QVQLQESGGGLVQAEGSLRLSCAASGRTRDANAMGWFRQAPGKERELVAAISWSGSRTYYADSVKGRFTISRDNVMHTVYLSMNSLKPEDTAVYYCAADRSIEVQIADYDYWGRGTQVTVSSAAAYPYDVPDYGSHHHHHH

SEQ ID NO: 1433 - protein, 140 aa, synthetic construct
  REGION 1..140: note = Synthetic Sequence
QVQLQESGGGSVQAGGSLRLSCAASGSTFSIKAMGWYRQAPGKQRELVAAFISGRGSTKYADSVKGRFAISRDNAKNTMYLQMDSLEPEDTAVYYCYIVLPTGGGSAMDYWGEGTQVTVSSAAAYPYDVPDYGSHHHHHH

SEQ ID NO: 1434 - protein, 140 aa, synthetic construct
  REGION 1..140: note = Synthetic Sequence
QVQLQESGGGVVQAGGSLRLSCAASGSTFSIKAMGWYRQAPGKQRDLVAGFISGRGSAKYADSVKGRFAISRDNAKNTMYLQMDSLKPEDTAVYYCYIVLTTGGGSAMDYWGQGTQVTVSSAAAYPYDVPDYGSHHHHHH

SEQ ID NO: 1435 - protein, 647 aa, Mus musculus
  REGION 1..647: note = MISC_FEATURE - pcDNA3.4-mouse light chainkappa-hIgG1-LALA-PG-20*GGS-3LEC89-20*GGS+G-IFNa2_R149A
  REGION 1..647: note = MISC_FEATURE - P-956: pcDNA3.4-mouse light chainkappa-hIgG1-LALA-PG-20*GGS-3LEC89-20*GGS+G-IFNa2_R149A
MKLPVRLLVLMFWIPASSSDKTHTCPPCPAPEAAGGPSVFLFPPKPKDTLMISRTPEVTCVVVDVSHEDPEVKFNWYVDGVEVHNAKTKPREEQYNSTYRVVSVLTVLHQDWLNGKEYKCKVSNKALGAPIEKTISKAKGQPREPQVYTLPPSRDELTKNQVSLTCLVKGFYPSDIAVEWESNGQPENNYKTTPPVLDSDGSFFLYSKLTVDKSRWQQGNVFSCSVMHEALHNHYTQKSLSLSPGKGGSGGSGGSGGSGGSGGSGGSGGSGGSGGSGGSGGSGGSGGSGGSGGSGGSGGSGGSGGSQVQLQESGGGLVQPGGSLRLSCAASGRIFSVNAMGWYRQAPGKQRELVAAITNQGAPTYADSVKGRFTISRDNAGNTVYLQMNSLRPEDTAVYYCKAFTRGDDYWGQGTQVTVSSGGSGGSGGSGGSGGSGGSGGSGGSGGSGGSGGSGGSGGSGGSGGSGGSGGSGGSGGSGGSGCDLPQTHSLGSRRTLMLLAQMRKISLFSCLKDRHDFGFPQEEFGNQFQKAETIPVLHEMIQQIFNLFSTKDSSAAWDETLLDKFYTELYQQLNDLEACVIQGVGVTETPLMKEDSILAVRKYFQRITLYLKEKKYSPCAWEVVRAEIMASFSLSTNLQESLRSKE

SEQ ID NO: 1436 - protein, 647 aa, Mus musculus
  REGION 1..647: note = MISC_FEATURE - P-957: pcDNA3.4-mouse Ig heavychain-3LEC89-20*GGS-hIgG1-LALA-PG-20*GGS+G-IFNa2_R149A
MGWSCIIFFLVATATGVHSQVQLQESGGGLVQPGGSLRLSCAASGRIFSVNAMGWYRQAPGKQRELVAAITNQGAPTYADSVKGRFTISRDNAGNTVYLQMNSLRPEDTAVYYCKAFTRGDDYWGQGTQVTVSSGGSGGSGGSGGSGGSGGSGGSGGSGGSGGSGGSGGSGGSGGSGGSGGSGGSGGSGGSGGSDKTHTCPPCPAPEAAGGPSVFLFPPKPKDTLMISRTPEVTCVVVDVSHEDPEVKFNWYVDGVEVHNAKTKPREEQYNSTYRVVSVLTVLHQDWLNGKEYKCKVSNKALGAPIEKTISKAKGQPREPQVYTLPPSRDELTKNQVSLTCLVKGFYPSDIAVEWESNGQPENNYKTTPPVLDSDGSFFLYSKLTVDKSRWQQGNVFSCSVMHEALHNHYTQKSLSLSPGKGGSGGSGGSGGSGGSGGSGGSGGSGGSGGSGGSGGSGGSGGSGGSGGSGGSGGSGGSGGSGCDLPQTHSLGSRRTLMLLAQMRKISLFSCLKDRHDFGFPQEEFGNQFQKAETIPVLHEMIQQIFNLFSTKDSSAAWDETLLDKFYTELYQQLNDLEACVIQGVGVTETPLMKEDSILAVRKYFQRITLYLKEKKYSPCAWEVVRAEIMASFSLSTNLQESLRSKE

SEQ ID NO: 1437 - protein, 421 aa, Mus musculus
  REGION 1..421: note = MISC_FEATURE - P-958: pcDNA3.4-mouse Ig heavychain-3LEC89-20*GGS-hIgG1-LALA-PG-YT (hole)
MGWSCIIFFLVATATGVHSQVQLQESGGGLVQPGGSLRLSCAASGRIFSVNAMGWYRQAPGKQRELVAAITNQGAPTYADSVKGRFTISRDNAGNTVYLQMNSLRPEDTAVYYCKAFTRGDDYWGQGTQVTVSSGGSGGSGGSGGSGGSGGSGGSGGSGGSGGSGGSGGSGGSGGSGGSGGSGGSGGSGGSGGSDKTHTCPPCPAPEAAGGPSVFLFPPKPKDTLMISRTPEVTCVVVDVSHEDPEVKFNWYVDGVEVHNAKTKPREEQYNSTYRVVSVLTVLHQDWLNGKEYKCKVSNKALGAPIEKTISKAKGQPREPQVYTLPPSRDELTKNQVSLTCLVKGFYPSDIAVEWESNGQPENNYKTTPPVLDSDGSFFLTSKLTVDKSRWQQGNVFSCSVMHEALHNHYTQKSLSLSPGK

SEQ ID NO: 1438 - protein, 472 aa, Mus musculus
  REGION 1..472: note = MISC_FEATURE - P-959: pcDNA3.4-mouse light chain kappa-hIgG1-LALA-PG-TY(knob)-20*GGS+G-IFNa2_R149A
MKLPVRLLVLMFWIPASSSDKTHTCPPCPAPEAAGGPSVFLFPPKPKDTLMISRTPEVTCVVVDVSHEDPEVKFNWYVDGVEVHNAKTKPREEQYNSTYRVVSVLTVLHQDWLNGKEYKCKVSNKALGAPIEKTISKAKGQPREPQVYTLPPSRDELTKNQVSLYCLVKGFYPSDIAVEWESNGQPENNYKTTPPVLDSDGSFFLYSKLTVDKSRWQQGNVFSCSVMHEALHNHYTQKSLSLSPGKGGSGGSGGSGGSGGSGGSGGSGGSGGSGGSGGSGGSGGSGGSGGSGGSGGSGGSGGSGGSGCDLPQTHSLGSRRTLMLLAQMRKISLFSCLKDRHDFGFPQEEFGNQFQKAETIPVLHEMIQQIFNLFSTKDSSAAWDETLLDKFYTELYQQLNDLEACVIQGVGVTETPLMKEDSILAVRKYFQRITLYLKEKKYSPCAWEVVRAEIMASFSLSTNLQESLRSKE

SEQ ID NO: 1439 - protein, 647 aa, Mus musculus
  REGION 1..647: note = MISC_FEATURE - P-960: pcDNA3.4-mouse light chain kappa-hIgG1-LALA-PG-YT(hole)-20*GGS-3LEC89-20*GGS+G-IFNa2_R 149A
MKLPVRLLVLMFWIPASSSDKTHTCPPCPAPEAAGGPSVFLFPPKPKDTLMISRTPEVTCVVVDVSHEDPEVKFNWYVDGVEVHNAKTKPREEQYNSTYRVVSVLTVLHQDWLNGKEYKCKVSNKALGAPIEKTISKAKGQPREPQVYTLPPSRDELTKNQVSLTCLVKGFYPSDIAVEWESNGQPENNYKTTPPVLDSDGSFFLTSKLTVDKSRWQQGNVFSCSVMHEALHNHYTQKSLSLSPGKGGSGGSGGSGGSGGSGGSGGSGGSGGSGGSGGSGGSGGSGGSGGSGGSGGSGGSGGSGGSQVQLQESGGGLVQPGGSLRLSCAASGRIFSVNAMGWYRQAPGKQRELVAAITNQGAPTYADSVKGRFTISRDNAGNTVYLQMNSLRPEDTAVYYCKAFTRGDDYWGQGTQVTVSSGGSGGSGGSGGSGGSGGSGGSGGSGGSGGSGGSGGSGGSGGSGGSGGSGGSGGSGGSGGSGCDLPQTHSLGSRRTLMLLAQMRKISLFSCLKDRHDFGFPQEEFGNQFQKAETIPVLHEMIQQIFNLFSTKDSSAAWDETLLDKFYTELYQQLNDLEACVIQGVGVTETPLMKEDSILAVRKYFQRITLYLKEKKYSPCAWEVVRAEIMASFSLSTNLQESLRSKE

SEQ ID NO: 1440 - protein, 647 aa, Mus musculus
  REGION 1..647: note = MISC_FEATURE - P-961: pcDNA3.4-mouse Ig heavychain-3LEC89-20*GGS-hIgG1-LALA-PG-YT (hole)-20*GGS+G-IFNa2_R149A
MGWSCIIFFLVATATGVHSQVQLQESGGGLVQPGGSLRLSCAASGRIFSVNAMGWYRQAPGKQRELVAAITNQGAPTYADSVKGRFTISRDNAGNTVYLQMNSLRPEDTAVYYCKAFTRGDDYWGQGTQVTVSSGGSGGSGGSGGSGGSGGSGGSGGSGGSGGSGGSGGSGGSGGSGGSGGSGGSGGSGGSGGSDKTHTCPPCPAPEAAGGPSVFLFPPKPKDTLMISRTPEVTCVVVDVSHEDPEVKFNWYVDGVEVHNAKTKPREEQYNSTYRVVSVLTVLHQDWLNGKEYKCKVSNKALGAPIEKTISKAKGQPREPQVYTLPPSRDELTKNQVSLTCLVKGFYPSDIAVEWESNGQPENNYKTTPPVLDSDGSFFLTSKLTVDKSRWQQGNVFSCSVMHEALHNHYTQKSLSLSPGKGGSGGSGGSGGSGGSGGSGGSGGSGGSGGSGGSGGSGGSGGSGGSGGSGGSGGSGGSGGSGCDLPQTHSLGSRRTLMLLAQMRKISLFSCLKDRHDFGFPQEEFGNQFQKAETIPVLHEMIQQIFNLFSTKDSSAAWDETLLDKFYTELYQQLNDLEACVIQGVGVTETPLMKEDSILAVRKYFQRITLYLKEKKYSPCAWEVVRAEIMASFSLSTNLQESLRSKE

SEQ ID NO: 1441 - protein, 246 aa, Mus musculus
  REGION 1..246: note = MISC_FEATURE - P-962: pcDNA3.4-mouse light chain kappa-hIgG1-LALA-PG-TY (knob)
MKLPVRLLVLMFWIPASSSDKTHTCPPCPAPEAAGGPSVFLFPPKPKDTLMISRTPEVTCVVVDVSHEDPEVKFNWYVDGVEVHNAKTKPREEQYNSTYRVVSVLTVLHQDWLNGKEYKCKVSNKALGAPIEKTISKAKGQPREPQVYTLPPSRDELTKNQVSLYCLVKGFYPSDIAVEWESNGQPENNYKTTPPVLDSDGSFFLYSKLTVDKSRWQQGNVFSCSVMHEALHNHYTQKSLSLSPGK

SEQ ID NO: 1442 - protein, 357 aa, synthetic construct
  REGION 1..357: note = Synthetic Sequence
DVQLVESGGGLVQPGGSLRLSCAASGSFSSINVMGWYRQAPGKERELVARITNLGLPNYADSVKGRFTISRDNSKNTVYLQMNSLRPEDTAVYYCYLVALKAEYWGQGTLVTVSSGGSGGSGGSGGSGGSDKTHTCPPCPAPEAAGGPSVFLFPPKPKDTLMISRTPEVTCVVVDVSHEDPEVKFNWYVDGVEVHNAKTKPREEQYNSTYRVVSVLTVLHQDWLNGKEYKCKVSNKALGAPIEKTISKAKGQPREPQVYTLPPSRDELTKNQVSLTCLVKGFYPSDIAVEWESNGQPENNYKTTPPVLDSDGSFFLTSKLTVDKSRWQQGNVFSCSVMHEALHNHYTQKSLSLSPGK

SEQ ID NO: 1443 - protein, 351 aa, synthetic construct
  REGION 1..351: note = Synthetic Sequence
DVQLVESGGGLVQPGGSLRLSCAASGSFSSINVMGWYRQAPGKERELVARITNLGLPNYADSVKGRFTISRDNSKNTVYLQMNSLRPEDTAVYYCYLVALKAEYWGQGTLVTVSSGGSGGSGGSDKTHTCPPCPAPEAAGGPSVFLFPPKPKDTLMISRTPEVTCVVVDVSHEDPEVKFNWYVDGVEVHNAKTKPREEQYNSTYRVVSVLTVLHQDWLNGKEYKCKVSNKALGAPIEKTISKAKGQPREPQVYTLPPSRDELTKNQVSLTCLVKGFYPSDIAVEWESNGQPENNYKTTPPVLDSDGSFFLTSKLTVDKSRWQQGNVFSCSVMHEALHNHYTQKSLSLSPGK

SEQ ID NO: 1444 - protein, 357 aa, synthetic construct
  REGION 1..357: note = Synthetic Sequence
DVQLVESGGGLVQPGGSLRLSCAASGRIFSVNAMGWYRQAPGKQRELVAAITNQGAPTYADSVKGRFTISRDNSKNTVYLQMNSLRPEDTAVYYCKAFTRGDDYWGQGTLVTVSSGGSGGSGGSGGSGGSDKTHTCPPCPAPEAAGGPSVFLFPPKPKDTLMISRTPEVTCVVVDVSHEDPEVKFNWYVDGVEVHNAKTKPREEQYNSTYRVVSVLTVLHQDWLNGKEYKCKVSNKALGAPIEKTISKAKGQPREPQVYTLPPSRDELTKNQVSLTCLVKGFYPSDIAVEWESNGQPENNYKTTPPVLDSDGSFFLTSKLTVDKSRWQQGNVFSCSVMHEALHNHYTQKSLSLSPGK

SEQ ID NO: 1445 - protein, 351 aa, synthetic construct
  REGION 1..351: note = Synthetic Sequence
DVQLVESGGGLVQPGGSLRLSCAASGRIFSVNAMGWYRQAPGKQRELVAAITNQGAPTYADSVKGRFTISRDNSKNTVYLQMNSLRPEDTAVYYCKAFTRGDDYWGQGTLVTVSSGGSGGSGGSDKTHTCPPCPAPEAAGGPSVFLFPPKPKDTLMISRTPEVTCVVVDVSHEDPEVKFNWYVDGVEVHNAKTKPREEQYNSTYRVVSVLTVLHQDWLNGKEYKCKVSNKALGAPIEKTISKAKGQPREPQVYTLPPSRDELTKNQVSLTCLVKGFYPSDIAVEWESNGQPENNYKTTPPVLDSDGSFFLTSKLTVDKSRWQQGNVFSCSVMHEALHNHYTQKSLSLSPGK

SEQ ID NO: 1446 - protein, 423 aa, synthetic construct
  REGION 1..423: note = Synthetic Sequence
DKTHTCPPCPAPEAAGGPSVFLFPPKPKDTLMISRTPEVTCVVVDVSHEDPEVKFNWYVDGVEVHNAKTKPREEQYNSTYRVVSVLTVLHQDWLNGKEYKCKVSNKALGAPIEKTISKAKGQPREPQVYTLPPSRDELTKNQVSLYCLVKGFYPSDIAVEWESNGQPENNYKTTPPVLDSDGSFFLYSKLTVDKSRWQQGNVFSCSVMHEALHNHYTQKSLSLSPGKGGSGGSGGSGGSGGSGGSGGSGGSGGSGGSGCDLPQTHSLGSRRTLMLLAQMRKISLFSCLKDRHDFGFPQEEFGNQFQKAETIPVLHEMIQQIFNLFSTKDSSAAWDETLLDKFYTELYQQLNDLEACVIQGVGVTETPLMKEDSILAVRKYFQRITLYLKEKKYSPCAWEVVRAEIMASFSLSTNLQESLRSKE

SEQ ID NO: 1447 - protein, 408 aa, synthetic construct
  REGION 1..408: note = Synthetic Sequence
DKTHTCPPCPAPEAAGGPSVFLFPPKPKDTLMISRTPEVTCVVVDVSHEDPEVKFNWYVDGVEVHNAKTKPREEQYNSTYRVVSVLTVLHQDWLNGKEYKCKVSNKALGAPIEKTISKAKGQPREPQVYTLPPSRDELTKNQVSLYCLVKGFYPSDIAVEWESNGQPENNYKTTPPVLDSDGSFFLYSKLTVDKSRWQQGNVFSCSVMHEALHNHYTQKSLSLSPGKGGSGGSGGSGGSGGSGCDLPQTHSLGSRRTLMLLAQMRKISLFSCLKDRHDFGFPQEEFGNQFQKAETIPVLHEMIQQIFNLFSTKDSSAAWDETLLDKFYTELYQQLNDLEACVIQGVGVTETPLMKEDSILAVRKYFQRITLYLKEKKYSPCAWEVVRAEIMASFSLSTNLQESLRSKE

SEQ ID NO: 1448 - protein, 402 aa, synthetic construct
  REGION 1..402: note = Synthetic Sequence
DKTHTCPPCPAPEAAGGPSVFLFPPKPKDTLMISRTPEVTCVVVDVSHEDPEVKFNWYVDGVEVHNAKTKPREEQYNSTYRVVSVLTVLHQDWLNGKEYKCKVSNKALGAPIEKTISKAKGQPREPQVYTLPPSRDELTKNQVSLYCLVKGFYPSDIAVEWESNGQPENNYKTTPPVLDSDGSFFLYSKLTVDKSRWQQGNVFSCSVMHEALHNHYTQKSLSLSPGKGGSGGSGGSGCDLPQTHSLGSRRTLMLLAQMRKISLFSCLKDRHDFGFPQEEFGNQFQKAETIPVLHEMIQQIFNLFSTKDSSAAWDETLLDKFYTELYQQLNDLEACVIQGVGVTETPLMKEDSILAVRKYFQRITLYLKEKKYSPCAWEVVRAEIMASFSLSTNLQESLRSKE

SEQ ID NO: 1449 - protein, 568 aa, synthetic construct
  REGION 1..568: note = Synthetic Sequence
DVQLVESGGGLVQPGGSLRLSCAASGRIFSVNAMGWYRQAPGKQRELVAAITNQGAPTYADSVKGRFTISRDNSKNTVYLQMNSLRPEDTAVYYCKAFTRGDDYWGQGTLVTVSSGGSGGSGGSGGSGGSGGSGGSGGSGGSGGSDKTHTCPPCPAPEAAGGPSVFLFPPKPKDTLMISRTPEVTCVVVDVSHEDPEVKFNWYVDGVEVHNAKTKPREEQYNSTYRVVSVLTVLHQDWLNGKEYKCKVSNKALGAPIEKTISKAKGQPREPQVYTLPPSRDELTKNQVSLTCLVKGFYPSDIAVEWESNGQPENNYKTTPPVLDSDGSFFLYSKLTVDKSRWQQGNVFSCSVMHEALHNHYTQKSLSLSPGKGGSGGSGGSGGSGGSGGSGGSGGSGGSGGSGCDLPQTHSLGSRRTLMLLAQMRKISLFSCLKDRHDFGFPQEEFGNQFQKAETIPVLHEMIQQIFNLFSTKDSSAAWDETLLDKFYTELYQQLNDLEACVIQGVGVTETPLMKEDSILAVRKYFQRITLYLKEKKYSPCAWEVVRAEIMASFSLSTNLQESLRSKE

SEQ ID NO: 1450 - protein, 538 aa, synthetic construct
  REGION 1..538: note = Synthetic Sequence
DVQLVESGGGLVQPGGSLRLSCAASGRIFSVNAMGWYRQAPGKQRELVAAITNQGAPTYADSVKGRFTISRDNSKNTVYLQMNSLRPEDTAVYYCKAFTRGDDYWGQGTLVTVSSGGSGGSGGSGGSGGSDKTHTCPPCPAPEAAGGPSVFLFPPKPKDTLMISRTPEVTCVVVDVSHEDPEVKFNWYVDGVEVHNAKTKPREEQYNSTYRVVSVLTVLHQDWLNGKEYKCKVSNKALGAPIEKTISKAKGQPREPQVYTLPPSRDELTKNQVSLTCLVKGFYPSDIAVEWESNGQPENNYKTTPPVLDSDGSFFLYSKLTVDKSRWQQGNVFSCSVMHEALHNHYTQKSLSLSPGKGGSGGSGGSGGSGGSGCDLPQTHSLGSRRTLMLLAQMRKISLFSCLKDRHDFGFPQEEFGNQFQKAETIPVLHEMIQQIFNLFSTKDSSAAWDETLLDKFYTELYQQLNDLEACVIQGVGVTETPLMKEDSILAVRKYFQRITLYLKEKKYSPCAWEVVRAEIMASFSLSTNLQESLRSKE

SEQ ID NO: 1451 - protein, 526 aa, synthetic construct
  REGION 1..526: note = Synthetic Sequence
DVQLVESGGGLVQPGGSLRLSCAASGRIFSVNAMGWYRQAPGKQRELVAAITNQGAPTYADSVKGRFTISRDNSKNTVYLQMNSLRPEDTAVYYCKAFTRGDDYWGQGTLVTVSSGGSGGSGGSDKTHTCPPCPAPEAAGGPSVFLFPPKPKDTLMISRTPEVTCVVVDVSHEDPEVKFNWYVDGVEVHNAKTKPREEQYNSTYRVVSVLTVLHQDWLNGKEYKCKVSNKALGAPIEKTISKAKGQPREPQVYTLPPSRDELTKNQVSLTCLVKGFYPSDIAVEWESNGQPENNYKTTPPVLDSDGSFFLYSKLTVDKSRWQQGNVFSCSVMHEALHNHYTQKSLSLSPGKGGSGGSGGSGCDLPQTHSLGSRRTLMLLAQMRKISLFSCLKDRHDFGFPQEEFGNQFQKAETIPVLHEMIQQIFNLFSTKDSSAAWDETLLDKFYTELYQQLNDLEACVIQGVGVTETPLMKEDSILAVRKYFQRITLYLKEKKYSPCAWEVVRAEIMASFSLSTNLQESLRSKE

SEQ ID NO: 1452 - protein, 514 aa, synthetic construct
  REGION 1..514: note = Synthetic Sequence
DVQLVESGGGLVQPGGSLRLSCAASGRIFSVNAMGWYRQAPGKQRELVAAITNQGAPTYADSVKGRFTISRDNSKNTVYLQMNSLRPEDTAVYYCKAFTRGDDYWGQGTLVTVSSAAADKTHTCPPCPAPEAAGGPSVFLFPPKPKDTLMISRTPEVTCVVVDVSHEDPEVKFNWYVDGVEVHNAKTKPREEQYNSTYRVVSVLTVLHQDWLNGKEYKCKVSNKALGAPIEKTISKAKGQPREPQVYTLPPSRDELTKNQVSLTCLVKGFYPSDIAVEWESNGQPENNYKTTPPVLDSDGSFFLYSKLTVDKSRWQQGNVFSCSVMHEALHNHYTQKSLSLSPGKAAAGCDLPQTHSLGSRRTLMLLAQMRKISLFSCLKDRHDFGFPQEEFGNQFQKAETIPVLHEMIQQIFNLFSTKDSSAAWDETLLDKFYTELYQQLNDLEACVIQGVGVTETPLMKEDSILAVRKYFQRITLYLKEKKYSPCAWEVVRAEIMASFSLSTNLQESLRSKE

SEQ ID NO: 1453 - protein, 402 aa, synthetic construct
  REGION 1..402: note = Synthetic Sequence
QVQLQESGGGLVQPGGSLRLSCAASGRIFSVNAMGWYRQAPGKQRELVAAITNQGAPTYADSVKGRFTISRDNAGNTVYLQMNSLRPEDTAVYYCKAFTRGDDYWGQGTQVTVSSGGSGGSGGSGGSGGSGGSGGSGGSGGSGGSGGSGGSGGSGGSGGSGGSGGSGGSGGSGGSDKTHTCPPCPAPEAAGGPSVFLFPPKPKDTLMISRTPEVTCVVVDVSHEDPEVKFNWYVDGVEVHNAKTKPREEQYNSTYRVVSVLTVLHQDWLNGKEYKCKVSNKALGAPIEKTISKAKGQPREPQVYTLPPSRDELTKNQVSLTCLVKGFYPSDIAVEWESNGQPENNYKTTPPVLDSDGSFFLTSKLTVDKSRWQQGNVFSCSVMHEALHNHYTQKSLSLSPGK

SEQ ID NO: 1454 - protein, 453 aa, synthetic construct
  REGION 1..453: note = Synthetic Sequence
DKTHTCPPCPAPEAAGGPSVFLFPPKPKDTLMISRTPEVTCVVVDVSHEDPEVKFNWYVDGVEVHNAKTKPREEQYNSTYRVVSVLTVLHQDWLNGKEYKCKVSNKALGAPIEKTISKAKGQPREPQVYTLPPSRDELTKNQVSLYCLVKGFYPSDIAVEWESNGQPENNYKTTPPVLDSDGSFFLYSKLTVDKSRWQQGNVFSCSVMHEALHNHYTQKSLSLSPGKGGSGGSGGSGGSGGSGGSGGSGGSGGSGGSGGSGGSGGSGGSGGSGGSGGSGGSGGSGGSGCDLPQTHSLGSRRTLMLLAQMRKISLFSCLKDRHDFGFPQEEFGNQFQKAETIPVLHEMIQQIFNLFSTKDSSAAWDETLLDKFYTELYQQLNDLEACVIQGVGVTETPLMKEDSILAVRKYFQRITLYLKEKKYSPCAWEVVRAEIMASFSLSTNLQESLRSKE

SEQ ID NO: 1455 - protein, 402 aa, synthetic construct
  REGION 1..402: note = Synthetic Sequence
QVQLQESGGGLVQPGGSLRLSCAASGRIFSVNAMGWYRQAPGKQRELVAAITNQGAPTYADSVKGRFTISRDNAGNTVYLQMNSLRPEDTAVYYCKAFTRGDDYWGQGTQVTVSSGGSGGSGGSGGSGGSGGSGGSGGSGGSGGSGGSGGSGGSGGSGGSGGSGGSGGSGGSGGSDKTHTCPPCPAPEAAGGPSVFLFPPKPKDTLMISRTPEVTCVVVDVSHEDPEVKFNWYVDGVEVHNAKTKPREEQYNSTYRVVSVLTVLHQDWLNGKEYKCQVSNKALPAPIEKTISKAKGQPREPQVYTLPPSRDELTKNQVSLTCLVKGFYPSDIAVEWESNGQPENNYKTTPPVLDSDGSFFLTSKLTVDKSRWQQGNVFSCSVMHEALHNHYTQKSLSLSPGK

SEQ ID NO: 1456 - protein, 453 aa, synthetic construct
  REGION 1..453: note = Synthetic Sequence
DKTHTCPPCPAPEAAGGPSVFLFPPKPKDTLMISRTPEVTCVVVDVSHEDPEVKFNWYVDGVEVHNAKTKPREEQYNSTYRVVSVLTVLHQDWLNGKEYQCKVSNKALPAPIEKTISKAKGQPREPQVYTLPPSRDELTKNQVSLYCLVKGFYPSDIAVEWESNGQPENNYKTTPPVLDSDGSFFLYSKLTVDKSRWQQGNVFSCSVMHEALHNHYTQKSLSLSPGKGGSGGSGGSGGSGGSGGSGGSGGSGGSGGSGGSGGSGGSGGSGGSGGSGGSGGSGGSGGSGCDLPQTHSLGSRRTLMLLAQMRKISLFSCLKDRHDFGFPQEEFGNQFQKAETIPVLHEMIQQIFNLFSTKDSSAAWDETLLDKFYTELYQQLNDLEACVIQGVGVTETPLMKEDSILAVRKYFQRITLYLKEKKYSPCAWEVVRAEIMASFSLSTNLQESLRSKE

SEQ ID NO: 1457 - protein, 402 aa, synthetic construct
  REGION 1..402: note = Synthetic Sequence
QVQLQESGGGLVQPGGSLRLSCAASGRIFSVNAMGWYRQAPGKQRELVAAITNQGAPTYADSVKGRFTISRDNAGNTVYLQMNSLRPEDTAVYYCKAFTRGDDYWGQGTQVTVSSGGSGGSGGSGGSGGSGGSGGSGGSGGSGGSGGSGGSGGSGGSGGSGGSGGSGGSGGSGGSDKTHTCPPCPAPEAAGGPSVFLFPPKPKDTLMISRTPEVTCVVVDVSHEDPEVKFNWYVDGVEVHNAKTKPREEQYNSTYRVVSVLTVLHQDWLNGKEYKCAVSNKALPAPIEKTISKAKGQPREPQVYTLPPSRDELTKNQVSLTCLVKGFYPSDIAVEWESNGQPENNYKTTPPVLDSDGSFFLTSKLTVDKSRWQQGNVFSCSVMHEALHNHYTQKSLSLSPGK

SEQ ID NO: 1458 - protein, 453 aa, synthetic construct
  REGION 1..453: note = Synthetic Sequence
DKTHTCPPCPAPEAAGGPSVFLFPPKPKDTLMISRTPEVTCVVVDVSHEDPEVKFNWYVDGVEVHNAKTKPREEQYNSTYRVVSVLTVLHQDWLNGKEYKCAVSNKALPAPIEKTISKAKGQPREPQVYTLPPSRDELTKNQVSLYCLVKGFYPSDIAVEWESNGQPENNYKTTPPVLDSDGSFFLYSKLTVDKSRWQQGNVFSCSVMHEALHNHYTQKSLSLSPGKGGSGGSGGSGGSGGSGGSGGSGGSGGSGGSGGSGGSGGSGGSGGSGGSGGSGGSGGSGGSGCDLPQTHSLGSRRTLMLLAQMRKISLFSCLKDRHDFGFPQEEFGNQFQKAETIPVLHEMIQQIFNLFSTKDSSAAWDETLLDKFYTELYQQLNDLEACVIQGVGVTETPLMKEDSILAVRKYFQRITLYLKEKKYSPCAWEVVRAEIMASFSLSTNLQESLRSKE

SEQ ID NO: 1459 - protein, 402 aa, synthetic construct
  REGION 1..402: note = Synthetic Sequence
QVQLQESGGGLVQPGGSLRLSCAASGRIFSVNAMGWYRQAPGKQRELVAAITNQGAPTYADSVKGRFTISRDNAGNTVYLQMNSLRPEDTAVYYCKAFTRGDDYWGQGTQVTVSSGGSGGSGGSGGSGGSGGSGGSGGSGGSGGSGGSGGSGGSGGSGGSGGSGGSGGSGGSGGSDKTHTCPPCPAPEAAGGPSVFLFPPKPKDTLMISRTPEVTCVVVDVSHEDPEVKFNWYVDGVEVHNAKTKPREEQYNSTYRVVSVLTVLHQDWLNGKEYKCKVSNKALPASIEKTISKAKGQPREPQVYTLPPSRDELTKNQVSLTCLVKGFYPSDIAVEWESNGQPENNYKTTPPVLDSDGSFFLTSKLTVDKSRWQQGNVFSCSVMHEALHNHYTQKSLSLSPGK

SEQ ID NO: 1460 - protein, 453 aa, synthetic construct
  REGION 1..453: note = Synthetic Sequence
DKTHTCPPCPAPEAAGGPSVFLFPPKPKDTLMISRTPEVTCVVVDVSHEDPEVKFNWYVDGVEVHNAKTKPREEQYNSTYRVVSVLTVLHQDWLNGKEYKCKVSNKALPASIEKTISKAKGQPREPQVYTLPPSRDELTKNQVSLYCLVKGFYPSDIAVEWESNGQPENNYKTTPPVLDSDGSFFLYSKLTVDKSRWQQGNVFSCSVMHEALHNHYTQKSLSLSPGKGGSGGSGGSGGSGGSGGSGGSGGSGGSGGSGGSGGSGGSGGSGGSGGSGGSGGSGGSGGSGCDLPQTHSLGSRRTLMLLAQMRKISLFSCLKDRHDFGFPQEEFGNQFQKAETIPVLHEMIQQIFNLFSTKDSSAAWDETLLDKFYTELYQQLNDLEACVIQGVGVTETPLMKEDSILAVRKYFQRITLYLKEKKYSPCAWEVVRAEIMASFSLSTNLQESLRSKE

SEQ ID NO: 1461 - protein, 357 aa, synthetic construct; identical to SEQ ID NO: 1442
  REGION 1..357: note = Synthetic Sequence

SEQ ID NO: 1462 - protein, 357 aa, synthetic construct; identical to SEQ ID NO: 1444
  REGION 1..357: note = Synthetic Sequence

SEQ ID NO: 1463 - protein, 423 aa, synthetic construct; identical to SEQ ID NO: 1446
  REGION 1..423: note = Synthetic Sequence

SEQ ID NO: 1464 - protein, 423 aa, synthetic construct
  REGION 1..423: note = Synthetic Sequence
DKTHTCPPCPAPEAAGGPSVFLFPPKPKDTLMISRTPEVTCVVVDVSHEDPEVKFNWYVDGVEVHNAKTKPREEQYNSTYRVVSVLTVLHQDWLNGKEYKCKVSNKALGAPIEKTISKAKGQPREPQVYTLPPSRDELTKNQVSLYCLVKGFYPSDIAVEWESNGQPENNYKTTPPVLDSDGSFFLYSKLTVDKSRWQQGNVFSCSVMHEALHNHYTQKSLSLSPGKGGSGGSGGSGGSGGSGGSGGSGGSGGSGGSGCDLPQTHSLGSRRTLMLLAQMRKISLFSCLKDRHDFGFPQEEFGNQFQKAETIPVLHEMIQQIFNLFSTKDSSAAWDETLLDKFYTELYQQLNDLEACVIQGVGVAETPLMKEDSILAVRKYFQRITLYLKEKKYSPCAWEVVRAEIMASFSLSTNLQESLRSKE

SEQ ID NO: 1465 - protein, 423 aa, synthetic construct
  REGION 1..423: note = Synthetic Sequence
DKTHTCPPCPAPEAAGGPSVFLFPPKPKDTLMISRTPEVTCVVVDVSHEDPEVKFNWYVDGVEVHNAKTKPREEQYNSTYRVVSVLTVLHQDWLNGKEYKCKVSNKALGAPIEKTISKAKGQPREPQVYTLPPSRDELTKNQVSLYCLVKGFYPSDIAVEWESNGQPENNYKTTPPVLDSDGSFFLYSKLTVDKSRWQQGNVFSCSVMHEALHNHYTQKSLSLSPGKGGSGGSGGSGGSGGSGGSGGSGGSGGSGGSGCDLPQTHSLGSRRTLMLLAQMRKISLFSCLKDRHDFGFPQEEFGNQFQKAETIPVLHEMIQQIFNLFSTKDSSAAWDETLLDKFYTELYQQLNDLEACVIQGVGVEETPLMKEDSILAVRKYFQRITLYLKEKKYSPCAWEVVRAEIMASFSLSTNLQESLRSKE

SEQ ID NO: 1466 - protein, 423 aa, synthetic construct
  REGION 1..423: note = Synthetic Sequence
DKTHTCPPCPAPEAAGGPSVFLFPPKPKDTLMISRTPEVTCVVVDVSHEDPEVKFNWYVDGVEVHNAKTKPREEQYNSTYRVVSVLTVLHQDWLNGKEYKCKVSNKALGAPIEKTISKAKGQPREPQVYTLPPSRDELTKNQVSLYCLVKGFYPSDIAVEWESNGQPENNYKTTPPVLDSDGSFFLYSKLTVDKSRWQQGNVFSCSVMHEALHNHYTQKSLSLSPGKGGSGGSGGSGGSGGSGGSGGSGGSGGSGGSGCDLPQTHSLGSRRTLMLLAQMRRISLFSCLKDRHDFGFPQEEFGNQFQKAETIPVLHEMIQQIFNLFSTKDSSAAWDETLLDKFYTELYQQLNDLEACVIQGVGVTETPLMKEDSILAVRKYFQRITLYLKEKKYSPCAWEVVRAEIMASFSLSTNLQESLRSKE

SEQ ID NO: 1467 - protein, 423 aa, synthetic construct
  REGION 1..423: note = Synthetic Sequence
DKTHTCPPCPAPEAAGGPSVFLFPPKPKDTLMISRTPEVTCVVVDVSHEDPEVKFNWYVDGVEVHNAKTKPREEQYNSTYRVVSVLTVLHQDWLNGKEYKCKVSNKALGAPIEKTISKAKGQPREPQVYTLPPSRDELTKNQVSLYCLVKGFYPSDIAVEWESNGQPENNYKTTPPVLDSDGSFFLYSKLTVDKSRWQQGNVFSCSVMHEALHNHYTQKSLSLSPGKGGSGGSGGSGGSGGSGGSGGSGGSGGSGGSGCDLPQTHSLGSRRTLMLLAQMRRISLFSCLKDRHDFGFPQEEFGNQFQKAETIPVLHEMIQQIFNLFSTKDSSAAWDETLLDKFYTELYQQLNDLEACVIQGVGVAETPLMKEDSILAVRKYFQRITLYLKEKKYSPCAWEVVRAEIMASFSLSTNLQESLRSKE

SEQ ID NO: 1468 - protein, 423 aa, synthetic construct
  REGION 1..423: note = Synthetic Sequence
DKTHTCPPCPAPEAAGGPSVFLFPPKPKDTLMISRTPEVTCVVVDVSHEDPEVKFNWYVDGVEVHNAKTKPREEQYNSTYRVVSVLTVLHQDWLNGKEYKCKVSNKALGAPIEKTISKAKGQPREPQVYTLPPSRDELTKNQVSLYCLVKGFYPSDIAVEWESNGQPENNYKTTPPVLDSDGSFFLYSKLTVDKSRWQQGNVFSCSVMHEALHNHYTQKSLSLSPGKGGSGGSGGSGGSGGSGGSGGSGGSGGSGGSGCDLPQTHSLGSRRTLMLLAQMRRISLFSCLKDRHDFGFPQEEFGNQFQKAETIPVLHEMIQQIFNLFSTKDSSAAWDETLLDKFYTELYQQLNDLEACVIQGVGVEETPLMKEDSILAVRKYFQRITLYLKEKKYSPCAWEVVRAEIMASFSLSTNLQESLRSKE

SEQ ID NO: 1469 - protein, 402 aa, synthetic construct; identical to SEQ ID NO: 1453
  REGION 1..402: note = Synthetic Sequence

SEQ ID NO: 1470 - protein, 453 aa, synthetic construct; identical to SEQ ID NO: 1454
  REGION 1..453: note = Synthetic Sequence

SEQ ID NO: 1471 - protein, 402 aa, synthetic construct
  REGION 1..402: note = Synthetic Sequence
DVQLVESGGGLVQPGGSLRLSCAASGSFSSINVMGWYRQAPGKERELVARITNLGLPNYADSVKGRFTISRDNSKNTVYLQMNSLRPEDTAVYYCYLVALKAEYWGQGTLVTVSSGGSGGSGGSGGSGGSGGSGGSGGSGGSGGSGGSGGSGGSGGSGGSGGSGGSGGSGGSGGSDKTHTCPPCPAPEAAGGPSVFLFPPKPKDTLMISRTPEVTCVVVDVSHEDPEVKFNWYVDGVEVHNAKTKPREEQYNSTYRVVSVLTVLHQDWLNGKEYKCKVSNKALGAPIEKTISKAKGQPREPQVYTLPPSRDELTKNQVSLTCLVKGFYPSDIAVEWESNGQPENNYKTTPPVLDSDGSFFLTSKLTVDKSRWQQGNVFSCSVMHEALHNHYTQKSLSLSPGK

SEQ ID NO: 1472 - protein, 452 aa, synthetic construct
  REGION 1..452: note = Synthetic Sequence
CDLPQTHSLGSRRTLMLLAQMRKISLFSCLKDRHDFGFPQEEFGNQFQKAETIPVLHEMIQQIFNLFSTKDSSAAWDETLLDKFYTELYQQLNDLEACVIQGVGVTETPLMKEDSILAVRKYFQRITLYLKEKKYSPCAWEVVRAEIMASFSLSTNLQESLRSKEGGSGGSGGSGGSGGSGGSGGSGGSGGSGGSGGSGGSGGSGGSGGSGGSGGSGGSGGSGGSDKTHTCPPCPAPEAAGGPSVFLFPPKPKDTLMISRTPEVTCVVVDVSHEDPEVKFNWYVDGVEVHNAKTKPREEQYNSTYRVVSVLTVLHQDWLNGKEYKCKVSNKALGAPIEKTISKAKGQPREPQVYTLPPSRDELTKNQVSLYCLVKGFYPSDIAVEWESNGQPENNYKTTPPVLDSDGSFFLYSKLTVDKSRWQQGNVFSCSVMHEALHNHYTQKSLSLSPGK

SEQ ID NO: 1473 - protein, 402 aa, synthetic construct
  REGION 1..402: note = Synthetic Sequence
DKTHTCPPCPAPEAAGGPSVFLFPPKPKDTLMISRTPEVTCVVVDVSHEDPEVKFNWYVDGVEVHNAKTKPREEQYNSTYRVVSVLTVLHQDWLNGKEYKCKVSNKALGAPIEKTISKAKGQPREPQVYTLPPSRDELTKNQVSLTCLVKGFYPSDIAVEWESNGQPENNYKTTPPVLDSDGSFFLTSKLTVDKSRWQQGNVFSCSVMHEALHNHYTQKSLSLSPGKGGSGGSGGSGGSGGSGGSGGSGGSGGSGGSGGSGGSGGSGGSGGSGGSGGSGGSGGSGGSDVQLVESGGGLVQPGGSLRLSCAASGSFSSINVMGWYRQAPGKERELVARITNLGLPNYADSVKGRFTISRDNSKNTVYLQMNSLRPEDTAVYYCYLVALKAEYWGQGTLVTVSS

SEQ ID NO: 1474 - protein, 402 aa, synthetic construct
  REGION 1..402: note = Synthetic Sequence
DKTHTCPPCPAPEAAGGPSVFLFPPKPKDTLMISRTPEVTCVVVDVSHEDPEVKFNWYVDGVEVHNAKTKPREEQYNSTYRVVSVLTVLHQDWLNGKEYKCKVSNKALGAPIEKTISKAKGQPREPQVYTLPPSRDELTKNQVSLTCLVKGFYPSDIAVEWESNGQPENNYKTTPPVLDSDGSFFLTSKLTVDKSRWQQGNVFSCSVMHEALHNHYTQKSLSLSPGKGGSGGSGGSGGSGGSGGSGGSGGSGGSGGSGGSGGSGGSGGSGGSGGSGGSGGSGGSGGSDVQLVESGGGLVQPGGSLRLSCAASGRIFSVNAMGWYRQAPGKQRELVAAITNQGAPTYADSVKGRFTISRDNSKNTVYLQMNSLRPEDTAVYYCKAFTRGDDYWGQGTLVTVSS

SEQ ID NO: 1475 - protein, 402 aa, synthetic construct; identical to SEQ ID NO: 1453
  REGION 1..402: note = Synthetic Sequence

SEQ ID NO: 1476 - protein, 453 aa, synthetic construct; identical to SEQ ID NO: 1454
  REGION 1..453: note = Synthetic Sequence

SEQ ID NO: 1477 - protein, 357 aa, synthetic construct; identical to SEQ ID NO: 1442
  REGION 1..357: note = Synthetic Sequence

SEQ ID NO: 1478 - protein, 400 aa, synthetic construct
  REGION 1..400: note = Synthetic Sequence
QLQESGGGLVQPGGSLRLSCAASGRIFSVNAMGWYRQAPGKQRELVAAITNQGAPTYADSVKGRFTISRDNAGNTVYLQMNSLRPEDTAVYYCKAFTRGDDYWGQGTQVTVSSGGSGGSGGSGGSGGSGGSGGSGGSGGSGGSGGSGGSGGSGGSGGSGGSGGSGGSGGSGGSDKTHTCPPCPAPEAAGGPSVFLFPPKPKDTLMISRTPEVTCVVVDVSHEDPEVKFNWYVDGVEVHNAKTKPREEQYNSTYRVVSVLTVLHQDWLNGKEYKCQVSNKALPAPIEKTISKAKGQPREPQVCTLPPSRDELTKNQVSLSCAVKGFYPSDIAVEWESNGQPENNYKTTPPVLDSDGSFFLVSKLTVDKSRWQQGNVFSCSVMHEALHNHYTQKSLSLSPGK

SEQ ID NO: 1479 - protein, 452 aa, synthetic construct
  REGION 1..452: note = Synthetic Sequence
DKTHTCPPCPAPEAAGGPSVFLFPPKPKDTLMISRTPEVTCVVVDVSHEDPEVKFNWYVDGVEVHNAKTKPREEQYNSTYRVVSVLTVLHQDWLNGKEYKCQVSNKALPAPIEKTISKAKGQPREPQVYTLPPCRDELTKNQVSLWCLVKGFYPSDIAVEWESNGQPENNYKTTPPVLDSDGSFFLYSKLTVDKSRWQQGNVFSCSVMHEALHNHYTQKSLSLSPGKGGSGGSGGSGGSGGSGGSGGSGGSGGSGGSGGSGGSGGSGGSGGSGGSGGSGGSGGSGGSCDLPQTHSLGSRRTLMLLAQMRKISLFSCLKDRHDFGFPQEEFGNQFQKAETIPVLHEMIQQIFNLFSTKDSSAAWDETLLDKFYTELYQQLNDLEACVIQGVGVEETPLMKEDSILAVRKYFQRITLYLKEKKYSPCAWEVVRAEIMASFSLSTNLQESLRSKE

SEQ ID NO: 1480 - protein, 402 aa, synthetic construct
  REGION 1..402: note = Synthetic Sequence
QVQLVESGGGLVHPGGSLRLSCAASGSFSSINVMGWYRQAPGKERELVARITNLGLPNYADSVTGRFTISRDNAKNTVYLQMNSLKPEDTAVYYCYLVALKAEYWGQGTQVTVSSGGSGGSGGSGGSGGSGGSGGSGGSGGSGGSGGSGGSGGSGGSGGSGGSGGSGGSGGSGGSDKTHTCPPCPAPEAAGGPSVFLFPPKPKDTLMISRTPEVTCVVVDVSHEDPEVKFNWYVDGVEVHNAKTKPREEQYNSTYRVVSVLTVLHQDWLNGKEYKCQVSNKALPAPIEKTISKAKGQPREPQVCTLPPSRDELTKNQVSLSCAVKGFYPSDIAVEWESNGQPENNYKTTPPVLDSDGSFFLVSKLTVDKSRWQQGNVFSCSVMHEALHNHYTQKSLSLSPGK

SEQ ID NO: 1481 - protein, 402 aa, synthetic construct; identical to SEQ ID NO: 1480
  REGION 1..402: note = Synthetic Sequence

SEQ ID NO: 1482 - protein, 452 aa, synthetic construct; identical to SEQ ID NO: 1479
  REGION 1..452: note = Synthetic Sequence

SEQ ID NO: 1483 - protein, 627 aa, synthetic construct
  REGION 1..627: note = Synthetic Sequence
QVQLVESGGGLVHPGGSLRLSCAASGSFSSINVMGWYRQAPGKERELVARITNLGLPNYADSVTGRFTISRDNAKNTVYLQMNSLKPEDTAVYYCYLVALKAEYWGQGTQVTVSSGGSGGSGGSGGSGGSGGSGGSGGSGGSGGSGGSGGSGGSGGSGGSGGSGGSGGSGGSGGSDKTHTCPPCPAPEAAGGPSVFLFPPKPKDTLMISRTPEVTCVVVDVSHEDPEVKFNWYVDGVEVHNAKTKPREEQYNSTYRVVSVLTVLHQDWLNGKEYKCQVSNKALPAPIEKTISKAKGQPREPQVYTLPPCRDELTKNQVSLWCLVKGFYPSDIAVEWESNGQPENNYKTTPPVLDSDGSFFLYSKLTVDKSRWQQGNVFSCSVMHEALHNHYTQKSLSLSPGKGGSGGSGGSGGSGGSGGSGGSGGSGGSGGSGGSGGSGGSGGSGGSGGSGGSGGSGGSGGSCDLPQTHSLGSRRTLMLLAQMRKISLFSCLKDRHDFGFPQEEFGNQFQKAETIPVLHEMIQQIFNLFSTKDSSAAWDETLLDKFYTELYQQLNDLEACVIQGVGVEETPLMKEDSILAVRKYFQRITLYLKEKKYSPCAWEVVRAEIMASFSLSTNLQESLRSKE

SEQ ID NO: 1484 - protein, 577 aa, synthetic construct
  REGION 1..577: note = Synthetic Sequence
QVQLVESGGGLVHPGGSLRLSCAASGSFSSINVMGWYRQAPGKERELVARITNLGLPNYADSVTGRFTISRDNAKNTVYLQMNSLKPEDTAVYYCYLVALKAEYWGQGTQVTVSSGGSGGSGGSGGSGGSGGSGGSGGSGGSGGSGGSGGSGGSGGSGGSGGSGGSGGSGGSGGSQVQLVESGGGLVHPGGSLRLSCAASGSFSSINVMGWYRQAPGKERELVARITNLGLPNYADSVTGRFTISRDNAKNTVYLQMNSLKPEDTAVYYCYLVALKAEYWGQGTQVTVSSGGSGGSGGSGGSGGSGGSGGSGGSGGSGGSGGSGGSGGSGGSGGSGGSGGSGGSGGSGGSDKTHTCPPCPAPEAAGGPSVFLFPPKPKDTLMISRTPEVTCVVVDVSHEDPEVKFNWYVDGVEVHNAKTKPREEQYNSTYRVVSVLTVLHQDWLNGKEYKCQVSNKALPAPIEKTISKAKGQPREPQVCTLPPSRDELTKNQVSLSCAVKGFYPSDIAVEWESNGQPENNYKTTPPVLDSDGSFFLVSKLTVDKSRWQQGNVFSCSVMHEALHNHYTQKSLSLSPGK

SEQ ID NO: 1485 - protein, 452 aa, synthetic construct; identical to SEQ ID NO: 1479
  REGION 1..452: note = Synthetic Sequence

SEQ ID NO: 1486 - protein, 357 aa, synthetic construct
  REGION 1..357: note = Synthetic Sequence
DVQLVESGGGLVQPGGSLRLSCAASGSFSSINVMGWYRQAPGKERELVARITNLGLPNYADSVKGRFTISRDNSKNTVYLQMNSLRPEDTAVYYCYLVALKAEYWGQGTLVTVSSGGSGGSGGSGGSGGSDKTHTCPPCPAPEAAGGPSVFLFPPKPKDTLMISRTPEVTCVVVDVSHEDPEVKFNWYVDGVEVHNAKTKPREEQYNSTYRVVSVLTVLHQDWLNGKEYKCQVSNKALPAPIEKTISKAKGQPREPQVYTLPPSRDELTKNQVSLTCLVKGFYPSDIAVEWESNGQPENNYKTTPPVLDSDGSFFLTSKLTVDKSRWQQGNVFSCSVMHEALHNHYTQKSLSLSPGK

SEQ ID NO: 1487 - protein, 423 aa, synthetic construct
  REGION 1..423: note = Synthetic Sequence
DKTHTCPPCPAPEAAGGPSVFLFPPKPKDTLMISRTPEVTCVVVDVSHEDPEVKFNWYVDGVEVHNAKTKPREEQYNSTYRVVSVLTVLHQDWLNGKEYKCQVSNKALPAPIEKTISKAKGQPREPQVYTLPPSRDELTKNQVSLYCLVKGFYPSDIAVEWESNGQPENNYKTTPPVLDSDGSFFLYSKLTVDKSRWQQGNVFSCSVMHEALHNHYTQKSLSLSPGKGGSGGSGGSGGSGGSGGSGGSGGSGGSGGSGCDLPQTHSLGSRRTLMLLAQMRRISLFSCLKDRHDFGFPQEEFGNQFQKAETIPVLHEMIQQIFNLFSTKDSSAAWDETLLDKFYTELYQQLNDLEACVIQGVGVTETPLMKEDSILAVRKYFQRITLYLKEKKYSPCAWEVVRAEIMASFSLSTNLQESLRSKE

SEQ ID NO: 1488 - protein, 423 aa, synthetic construct
  REGION 1..423: note = Synthetic Sequence
DKTHTCPPCPAPEAAGGPSVFLFPPKPKDTLMISRTPEVTCVVVDVSHEDPEVKFNWYVDGVEVHNAKTKPREEQYNSTYRVVSVLTVLHQDWLNGKEYKCQVSNKALPAPIEKTISKAKGQPREPQVYTLPPSRDELTKNQVSLYCLVKGFYPSDIAVEWESNGQPENNYKTTPPVLDSDGSFFLYSKLTVDKSRWQQGNVFSCSVMHEALHNHYTQKSLSLSPGKGGSGGSGGSGGSGGSGGSGGSGGSGGSGGSGCDLPQTHSLGSRRTLMLLAQMRRISLFSCLKDRHDFGFPQEEFGNQFQKAETIPVLHEMIQQIFNLFSTKDSSAAWDETLLDKFYTELYQQLNDLEACVIQGVGVEETPLMKEDSILAVRKYFQRITLYLKEKKYSPCAWEVVRAEIMASFSLSTNLQESLRSKE

SEQ ID NO: 1489 - protein, 357 aa, synthetic construct
  REGION 1..357: note = Synthetic Sequence
DVQLVESGGGLVQPGGSLRLSCAASGSFSSINVMGWYRQAPGKERELVARITNLGLPNYADSVKGRFTISRDNSKNTVYLQMNSLRPEDTAVYYCYLVALKAEYWGQGTLVTVSSGGSGGSGGSGGSGGSDKTHTCPPCPAPEAAGGPSVFLFPPKPKDTLMISRTPEVTCVVVDVSHEDPEVKFNWYVDGVEVHNAKTKPREEQYNSTYRVVSVLTVLHQDWLNGKEYKCQVSNKALPAPIEKTISKAKGQPREPQVCTLPPSRDELTKNQVSLSCAVKGFYPSDIAVEWESNGQPENNYKTTPPVLDSDGSFFLVSKLTVDKSRWQQGNVFSCSVMHEALHNHYTQKSLSLSPGK

SEQ ID NO: 1490 - protein, 423 aa, synthetic construct
  REGION 1..423: note = Synthetic Sequence
DKTHTCPPCPAPEAAGGPSVFLFPPKPKDTLMISRTPEVTCVVVDVSHEDPEVKFNWYVDGVEVHNAKTKPREEQYNSTYRVVSVLTVLHQDWLNGKEYKCQVSNKALPAPIEKTISKAKGQPREPQVYTLPPCRDELTKNQVSLWCLVKGFYPSDIAVEWESNGQPENNYKTTPPVLDSDGSFFLYSKLTVDKSRWQQGNVFSCSVMHEALHNHYTQKSLSLSPGKGGSGGSGGSGGSGGSGGSGGSGGSGGSGGSGCDLPQTHSLGSRRTLMLLAQMRRISLFSCLKDRHDFGFPQEEFGNQFQKAETIPVLHEMIQQIFNLFSTKDSSAAWDETLLDKFYTELYQQLNDLEACVIQGVGVTETPLMKEDSILAVRKYFQRITLYLKEKKYSPCAWEVVRAEIMASFSLSTNLQESLRSKE

SEQ ID NO: 1491 - protein, 423 aa, synthetic construct
  REGION 1..423: note = Synthetic Sequence
DKTHTCPPCPAPEAAGGPSVFLFPPKPKDTLMISRTPEVTCVVVDVSHEDPEVKFNWYVDGVEVHNAKTKPREEQYNSTYRVVSVLTVLHQDWLNGKEYKCQVSNKALPAPIEKTISKAKGQPREPQVYTLPPCRDELTKNQVSLWCLVKGFYPSDIAVEWESNGQPENNYKTTPPVLDSDGSFFLYSKLTVDKSRWQQGNVFSCSVMHEALHNHYTQKSLSLSPGKGGSGGSGGSGGSGGSGGSGGSGGSGGSGGSGCDLPQTHSLGSRRTLMLLAQMRRISLFSCLKDRHDFGFPQEEFGNQFQKAETIPVLHEMIQQIFNLFSTKDSSAAWDETLLDKFYTELYQQLNDLEACVIQGVGVEETPLMKEDSILAVRKYFQRITLYLKEKKYSPCAWEVVRAEIMASFSLSTNLQESLRSKE

SEQ ID NO: 1492 - protein, 647 aa, synthetic construct
  REGION 1..647: note = Synthetic Sequence
QVQLQESGGGLVQAGGSLRLSCTASGTIFSINRMDWFRQAPGKQRELVALITSDGTPAYADSAKGRFTISRDNTKKTVSLQMNSLKPEDTAVYYCHVSSGVYNYWGQGTQVTVSSAAAYPYDVPDYGSGGSGGSGGSGGSGGSGGSGGSGGSGGSGGSGGSGGSGGSGGSGGSGGSGGSGGSGGSGGSDKTHTCPPCPAPEAAGGPSVFLFPPKPKDTLMISRTPEVTCVVVDVSHEDPEVKFNWYVDGVEVHNAKTKPREEQYNSTYRVVSVLTVLHQDWLNGKEYKCKVSNKALGAPIEKTISKAKGQPREPQVYTLPPSRDELTKNQVSLTCLVKGFYPSDIAVEWESNGQPENNYKTTPPVLDSDGSFFLYSKLTVDKSRWQQGNVFSCSVMHEALHNHYTQKSLSLSPGKGGSGGSGGSGGSGGSGGSGGSGGSGGSGGSGGSGGSGGSGGSGGSGGSGGSGGSGGSGGSGCDLPQTHSLGSRRTLMLLAQMRKISLFSCLKDRHDFGFPQEEFGNQFQKAETIPVLHEMIQQIFNLFSTKDSSAAWDETLLDKFYTELYQQLNDLEACVIQGVGVTETPLMKEDSILAVRKYFQRITLYLKEKKYSPCAWEVVRAEIMASFSLSTNLQESLRSKEHHHHHH

SEQ ID NO: 1493 - protein, 402 aa, synthetic construct
  REGION 1..402: note = Synthetic Sequence
QVQLQESGGGLVQAGGSLRLSCTASGTIFSINRMDWFRQAPGKQRELVALITSDGTPAYADSAKGRFTISRDNTKKTVSLQMNSLKPEDTAVYYCHVSSGVYNYWGQGTQVTVSSGGSGGSGGSGGSGGSGGSGGSGGSGGSGGSGGSGGSGGSGGSGGSGGSGGSGGSGGSGGSDKTHTCPPCPAPEAAGGPSVFLFPPKPKDTLMISRTPEVTCVVVDVSHEDPEVKFNWYVDGVEVHNAKTKPREEQYNSTYRVVSVLTVLHQDWLNGKEYKCKVSNKALGAPIEKTISKAKGQPREPQVYTLPPSRDELTKNQVSLTCLVKGFYPSDIAVEWESNGQPENNYKTTPPVLDSDGSFFLTSKLTVDKSRWQQGNVFSCSVMHEALHNHYTQKSLSLSPGK

SEQ ID NO: 1494 - protein, 453 aa, synthetic construct; identical to SEQ ID NO: 1454
  REGION 1..453: note = Synthetic Sequence

SEQ ID NO: 1495 - protein, 402 aa, synthetic construct
  REGION 1..402: note = Synthetic Sequence
QVQLQESGGGLVQAGGSLRLSCTASGTIFSINRMDWFRQAPGKQRELVALITSDGTPAYADSAKGRFTISRDNTKKTVSLQMNSLKPEDTAVYYCHVSSGVYNYWGQGTQVTVSSGGSGGSGGSGGSGGSGGSGGSGGSGGSGGSGGSGGSGGSGGSGGSGGSGGSGGSGGSGGSDKTHTCPPCPAPEAAGGPSVFLFPPKPKDTLMISRTPEVTCVVVDVSHEDPEVKFNWYVDGVEVHNAKTKPREEQYNSTYRVVSVLTVLHQDWLNGKEYKCQVSNKALPAPIEKTISKAKGQPREPQVCTLPPSRDELTKNQVSLSCAVKGFYPSDIAVEWESNGQPENNYKTTPPVLDSDGSFFLVSKLTVDKSRWQQGNVFSCSVMHEALHNHYTQKSLSLSPGK

SEQ ID NO: 1496 - protein, 627 aa, synthetic construct
  REGION 1..627: note = Synthetic Sequence
QVQLQESGGGLVQAGGSLRLSCTASGTIFSINRMDWFRQAPGKQRELVALITSDGTPAYADSAKGRFTISRDNTKKTVSLQMNSLKPEDTAVYYCHVSSGVYNYWGQGTQVTVSSGGSGGSGGSGGSGGSGGSGGSGGSGGSGGSGGSGGSGGSGGSGGSGGSGGSGGSGGSGGSDKTHTCPPCPAPEAAGGPSVFLFPPKPKDTLMISRTPEVTCVVVDVSHEDPEVKFNWYVDGVEVHNAKTKPREEQYNSTYRVVSVLTVLHQDWLNGKEYKCQVSNKALPAPIEKTISKAKGQPREPQVYTLPPCRDELTKNQVSLWCLVKGFYPSDIAVEWESNGQPENNYKTTPPVLDSDGSFFLYSKLTVDKSRWQQGNVFSCSVMHEALHNHYTQKSLSLSPGKGGSGGSGGSGGSGGSGGSGGSGGSGGSGGSGGSGGSGGSGGSGGSGGSGGSGGSGGSGGSCDLPQTHSLGSRRTLMLLAQMRKISLFSCLKDRHDFGFPQEEFGNQFQKAETIPVLHEMIQQIFNLFSTKDSSAAWDETLLDKFYTELYQQLNDLEACVIQGVGVEETPLMKEDSILAVRKYFQRITLYLKEKKYSPCAWEVVRAEIMASFSLSTNLQESLRSKE

SEQ ID NO: 1497 - protein, 414 aa, synthetic construct
  REGION 1..414: note = Synthetic Sequence
QVQLQESGGGSVQAGDSLRLSCAASGRTFSGYAMGWFRQAPGKEREFVATISTSGSSTYYADSVKGRFTISRDNAKKSVYLQINSLKTEDAAVYYCAARLSFDNTAFYTSAIRYSYWGQGTQVTVSSGGSGGSGGSGGSGGSGGSGGSGGSGGSGGSGGSGGSGGSGGSGGSGGSGGSGGSGGSGGSDKTHTCPPCPAPEAAGGPSVFLFPPKPKDTLMISRTPEVTCVVVDVSHEDPEVKFNWYVDGVEVHNAKTKPREEQYNSTYRVVSVLTVLHQDWLNGKEYKCQVSNKALPAPIEKTISKAKGQPREPQVCTLPPSRDELTKNQVSLSCAVKGFYPSDIAVEWESNGQPENNYKTTPPVLDSDGSFFLVSKLTVDKSRWQQGNVFSCSVMHEALHNHYTQKSLSLSPGK

SEQ ID NO: 1498 - protein, 452 aa, synthetic construct; identical to SEQ ID NO: 1479
  REGION 1..452: note = Synthetic Sequence

SEQ ID NO: 1499 - protein, 405 aa, synthetic construct
  REGION 1..405: note = Synthetic Sequence
QVQLQESGGGLAQAGGSLRLSCAASGRTFSMGWFRQAPGKEREFVAAITYSGGSPYYASSVRGRFTISRDNAKNTVYLQMNSLKPEDTAVYYCAANPTYGSDWNAENWGQGTQVTVSSGGSGGSGGSGGSGGSGGSGGSGGSGGSGGSGGSGGSGGSGGSGGSGGSGGSGGSGGSGGSDKTHTCPPCPAPEAAGGPSVFLFPPKPKDTLMISRTPEVTCVVVDVSHEDPEVKFNWYVDGVEVHNAKTKPREEQYNSTYRVVSVLTVLHQDWLNGKEYKCQVSNKALPAPIEKTISKAKGQPREPQVCTLPPSRDELTKNQVSLSCAVKGFYPSDIAVEWESNGQPENNYKTTPPVLDSDGSFFLVSKLTVDKSRWQQGNVFSCSVMHEALHNHYTQKSLSLSPGK

SEQ ID NO: 1500 - protein, 452 aa, synthetic construct; identical to SEQ ID NO: 1479
  REGION 1..452: note = Synthetic Sequence

SEQ ID NO: 1501 - protein, 452 aa, synthetic construct; identical to SEQ ID NO: 1479
  REGION 1..452: note = Synthetic Sequence

SEQ ID NO: 1502 - protein, 407 aa, synthetic construct
  REGION 1..407: note = Synthetic Sequence
QVQLQESGGGLVQPGGSLRLSCAASGSTFSINAVAWYRQAPGKRRELVAGISGGGVTNYPDSVKGRFTISRDNAKNTVYLQMSSLKPEDTAVYYCNLWPPRASPGGRVYWGQGTQVTVSSGGSGGSGGSGGSGGSGGSGGSGGSGGSGGSGGSGGSGGSGGSGGSGGSGGSGGSGGSGGSDKTHTCPPCPAPEAAGGPSVFLFPPKPKDTLMISRTPEVTCVVVDVSHEDPEVKFNWYVDGVEVHNAKTKPREEQYNSTYRVVSVLTVLHQDWLNGKEYKCQVSNKALPAPIEKTISKAKGQPREPQVCTLPPSRDELTKNQVSLSCAVKGFYPSDIAVEWESNGQPENNYKTTPPVLDSDGSFFLVSKLTVDKSRWQQGNVFSCSVMHEALHNHYTQKSLSLSPGK

SEQ ID NO: 1503 - protein, 407 aa, synthetic construct
  REGION 1..407: note = Synthetic Sequence
QVQLQESGGGLVQPGGSLRLSCAASGSTFSGNAMAWYRQAPGKRRELVAGISGGGVTNYPDSVKGRFTISRDNAKNTVYLQMSSLKPEDTAVYYCNLWPPRVSPGGGVYWGQGTQVTVSSGGSGGSGGSGGSGGSGGSGGSGGSGGSGGSGGSGGSGGSGGSGGSGGSGGSGGSGGSGGSDKTHTCPPCPAPEAAGGPSVFLFPPKPKDTLMISRTPEVTCVVVDVSHEDPEVKFNWYVDGVEVHNAKTKPREEQYNSTYRVVSVLTVLHQDWLNGKEYKCQVSNKALPAPIEKTISKAKGQPREPQVCTLPPSRDELTKNQVSLSCAVKGFYPSDIAVEWESNGQPENNYKTTPPVLDSDGSFFLVSKLTVDKSRWQQGNVFSCSVMHEALHNHYTQKSLSLSPGK

SEQ ID NO: 1504 - protein, 407 aa, synthetic construct
  REGION 1..407: note = Synthetic Sequence
QVQLQESGGGLVQPGESLRLSCAVSGSTSSMNAMAWYRQAPGKRRELVAGISGGGATNYPDSVKGRFTISRDNAKNTVYLQMSSLKPEDTAVYYCNLWPPRASPGGGVYWGQGTQVTVSSGGSGGSGGSGGSGGSGGSGGSGGSGGSGGSGGSGGSGGSGGSGGSGGSGGSGGSGGSGGSDKTHTCPPCPAPEAAGGPSVFLFPPKPKDTLMISRTPEVTCVVVDVSHEDPEVKFNWYVDGVEVHNAKTKPREEQYNSTYRVVSVLTVLHQDWLNGKEYKCQVSNKALPAPIEKTISKAKGQPREPQVCTLPPSRDELTKNQVSLSCAVKGFYPSDIAVEWESNGQPENNYKTTPPVLDSDGSFFLVSKLTVDKSRWQQGNVFSCSVMHEALHNHYTQKSLSLSPGK

SEQ ID NO: 1505 - protein, 452 aa, synthetic construct; identical to SEQ ID NO: 1479
  REGION 1..452: note = Synthetic Sequence

SEQ ID NO: 1506 - protein, 411 aa, synthetic construct
  REGION 1..411: note = Synthetic Sequence
QVQLQESGGGLVHPGGSLRLSCAASGRSFSSYFMGWFRQAPGKEREFVAGIGWNDGSINYADSVKGRFTISRDNAKNTGYLQMNSLKPEDTAVYYCAASVSLYGLEKSSAYTSWGQGTQVTVSSGGSGGSGGSGGSGGSGGSGGSGGSGGSGGSGGSGGSGGSGGSGGSGGSGGSGGSGGSGGSDKTHTCPPCPAPEAAGGPSVFLFPPKPKDTLMISRTPEVTCVVVDVSHEDPEVKFNWYVDGVEVHNAKTKPREEQYNSTYRVVSVLTVLHQDWLNGKEYKCQVSNKALPAPIEKTISKAKGQPREPQVCTLPPSRDELTKNQVSLSCAVKGFYPSDIAVEWESNGQPENNYKTTPPVLDSDGSFFLVSKLTVDKSRWQQGNVFSCSVMHEALHNHYTQKSLSLSPGK

SEQ ID NO: 1507 - protein, 452 aa, synthetic construct; identical to SEQ ID NO: 1479
  REGION 1..452: note = Synthetic Sequence

SEQ ID NO: 1508 - protein, 452 aa, synthetic construct; identical to SEQ ID NO: 1479
  REGION 1..452: note = Synthetic Sequence

SEQ ID NO: 1509 - protein, 577 aa, synthetic construct
  REGION 1..577: note = Synthetic Sequence
QVQLVESGGGLVHPGGSLRLSCAASGSFSSINVMGWYRQAPGKERELVARITNLGLPNYADSVTGRFTISRDNAKNTVYLQMNSLKPEDTAVYYCYLVALKAEYWGQGTQVTVSSGGSGGSGGSGGSGGSGGSGGSGGSGGSGGSGGSGGSGGSGGSGGSGGSGGSGGSGGSGGSQVQLQESGGGLVQAGGSLRLSCTASGTIFSINRMDWFRQAPGKQRELVALITSDGTPAYADSAKGRFTISRDNTKKTVSLQMNSLKPEDTAVYYCHVSSGVYNYWGQGTQVTVSSGGSGGSGGSGGSGGSGGSGGSGGSGGSGGSGGSGGSGGSGGSGGSGGSGGSGGSGGSGGSDKTHTCPPCPAPEAAGGPSVFLFPPKPKDTLMISRTPEVTCVVVDVSHEDPEVKFNWYVDGVEVHNAKTKPREEQYNSTYRVVSVLTVLHQDWLNGKEYKCQVSNKALPAPIEKTISKAKGQPREPQVCTLPPSRDELTKNQVSLSCAVKGFYPSDIAVEWESNGQPENNYKTTPPVLDSDGSFFLVSKLTVDKSRWQQGNVFSCSVMHEALHNHYTQKSLSLSPGK

SEQ ID NO: 1510 - protein, 577 aa, synthetic construct
  REGION 1..577: note = Synthetic Sequence
QVQLQESGGGLVQAGGSLRLSCTASGTIFSINRMDWFRQAPGKQRELVALITSDGTPAYADSAKGRFTISRDNTKKTVSLQMNSLKPEDTAVYYCHVSSGVYNYWGQGTQVTVSSGGSGGSGGSGGSGGSGGSGGSGGSGGSGGSGGSGGSGGSGGSGGSGGSGGSGGSGGSGGSQVQLVESGGGLVHPGGSLRLSCAASGSFSSINVMGWYRQAPGKERELVARITNLGLPNYADSVTGRFTISRDNAKNTVYLQMNSLKPEDTAVYYCYLVALKAEYWGQGTQVTVSSGGSGGSGGSGGSGGSGGSGGSGGSGGSGGSGGSGGSGGSGGSGGSGGSGGSGGSGGSGGSDKTHTCPPCPAPEAAGGPSVFLFPPKPKDTLMISRTPEVTCVVVDVSHEDPEVKFNWYVDGVEVHNAKTKPREEQYNSTYRVVSVLTVLHQDWLNGKEYKCQVSNKALPAPIEKTISKAKGQPREPQVYTLPPCRDELTKNQVSLWCLVKGFYPSDIAVEWESNGQPENNYKTTPPVLDSDGSFFLYSKLTVDKSRWQQGNVFSCSVMHEALHNHYTQKSLSLSPGK

SEQ ID NO: 1511 - protein, 402 aa, synthetic construct; identical to SEQ ID NO: 1480
  REGION 1..402: note = Synthetic Sequence

SEQ ID NO: 1512 - protein, 402 aa, synthetic construct; identical to SEQ ID NO: 1495
  REGION 1..402: note = Synthetic Sequence

SEQ ID NO: 1513 - protein, 452 aa, synthetic construct; identical to SEQ ID NO: 1479
  REGION 1..452: note = Synthetic Sequence

SEQ ID NO: 1514 - protein, 627 aa, synthetic construct; identical to SEQ ID NO: 1496
  REGION 1..627: note = Synthetic Sequence

SEQ ID NO: 1515 - protein, 577 aa, synthetic construct
  REGION 1..577: note = Synthetic Sequence
QVQLQESGGGLVQPGGSLRLSCAASGRIFSVNAMGWYRQAPGKQRELVAAITNQGAPTYADSVKGRFTISRDNAGNTVYLQMNSLRPEDTAVYYCKAFTRGDDYWGQGTQVTVSSGGSGGSGGSGGSGGSGGSGGSGGSGGSGGSGGSGGSGGSGGSGGSGGSGGSGGSGGSGGSDKTHTCPPCPAPEAAGGPSVFLFPPKPKDTLMISRTPEVTCVVVDVSHEDPEVKFNWYVDGVEVHNAKTKPREEQYNSTYRVVSVLTVLHQDWLNGKEYKCQVSNKALPAPIEKTISKAKGQPREPQVCTLPPSRDELTKNQVSLSCAVKGFYPSDIAVEWESNGQPENNYKTTPPVLDSDGSFFLVSKLTVDKSRWQQGNVFSCSVMHEALHNHYTQKSLSLSPGKGGSGGSGGSGGSGGSGGSGGSGGSGGSGGSGGSGGSGGSGGSGGSGGSGGSGGSGGSGGSQVQLQESGGGLVQAGGSLRLSCTASGTIFSINRMDWFRQAPGKQRELVALITSDGTPAYADSAKGRFTISRDNTKKTVSLQMNSLKPEDTAVYYCHVSSGVYNYWGQGTQVTVSS

SEQ ID NO: 1516 - protein, 577 aa, synthetic construct; identical to SEQ ID NO: 1509
  REGION 1..577: note = Synthetic Sequence

SEQ ID NO: 1517 - protein, 802 aa, synthetic construct
  REGION 1..802: note = Synthetic Sequence
QVQLVESGGGLVHPGGSLRLSCAASGSFSSINVMGWYRQAPGKERELVARITNLGLPNYADSVTGRFTISRDNAKNTVYLQMNSLKPEDTAVYYCYLVALKAEYWGQGTQVTVSSGGSGGSGGSGGSGGSGGSGGSGGSGGSGGSGGSGGSGGSGGSGGSGGSGGSGGSGGSGGSQVQLQESGGGLVQAGGSLRLSCTASGTIFSINRMDWFRQAPGKQRELVALITSDGTPAYADSAKGRFTISRDNTKKTVSLQMNSLKPEDTAVYYCHVSSGVYNYWGQGTQVTVSSGGSGGSGGSGGSGGSGGSGGSGGSGGSGGSGGSGGSGGSGGSGGSGGSGGSGGSGGSGGSDKTHTCPPCPAPEAAGGPSVFLFPPKPKDTLMISRTPEVTCVVVDVSHEDPEVKFNWYVDGVEVHNAKTKPREEQYNSTYRVVSVLTVLHQDWLNGKEYKCQVSNKALPAPIEKTISKAKGQPREPQVYTLPPCRDELTKNQVSLWCLVKGFYPSDIAVEWESNGQPENNYKTTPPVLDSDGSFFLYSKLTVDKSRWQQGNVFSCSVMHEALHNHYTQKSLSLSPGKGGSGGSGGSGGSGGSGGSGGSGGSGGSGGSGGSGGSGGSGGSGGSGGSGGSGGSGGSGGSCDLPQTHSLGSRRTLMLLAQMRKISLFSCLKDRHDFGFPQEEFGNQFQKAETIPVLHEMIQQIFNLFSTKDSSAAWDETLLDKFYTELYQQLNDLEACVIQGVGVEETPLMKEDSILAVRKYFQRITLYLKEKKYSPCAWEVVRAEIMASFSLSTNLQESLRSKE

SEQ ID NO: 1518 - protein, 414 aa, synthetic construct; identical to SEQ ID NO: 1497
  REGION 1..414: note = Synthetic Sequence

SEQ ID NO: 1519 - protein, 411 aa, synthetic construct; identical to SEQ ID NO: 1506
  REGION 1..411: note = Synthetic Sequence

SEQ ID NO: 1520 - protein, 452 aa, synthetic construct; identical to SEQ ID NO: 1479
  REGION 1..452: note = Synthetic Sequence

SEQ ID NO: 1521 - protein, 632 aa, synthetic construct
  REGION 1..632: note = Synthetic Sequence
QVQLQESGGGLVQPGGSLRLSCAASGSIFSINVMGWYRQTPGKERELVAKITNFGITSYADSAQGRFTISRGNAKNTVYLQMNSLKPEDTAVYYCNLDTTGWGPPPYQYWGQGTQVTVSSGGSGGSGGSGGSGGSGGSGGSGGSGGSGGSGGSGGSGGSGGSGGSGGSGGSGGSGGSGGSDKTHTCPPCPAPEAAGGPSVFLFPPKPKDTLMISRTPEVTCVVVDVSHEDPEVKFNWYVDGVEVHNAKTKPREEQYNSTYRVVSVLTVLHQDWLNGKEYKCQVSNKALPAPIEKTISKAKGQPREPQVYTLPPCRDELTKNQVSLWCLVKGFYPSDIAVEWESNGQPENNYKTTPPVLDSDGSFFLYSKLTVDKSRWQQGNVFSCSVMHEALHNHYTQKSLSLSPGKGGSGGSGGSGGSGGSGGSGGSGGSGGSGGSGGSGGSGGSGGSGGSGGSGGSGGSGGSGGSCDLPQTHSLGSRRTLMLLAQMRKISLFSCLKDRHDFGFPQEEFGNQFQKAETIPVLHEMIQQIFNLFSTKDSSAAWDETLLDKFYTELYQQLNDLEACVIQGVGVEETPLMKEDSILAVRKYFQRITLYLKEKKYSPCAWEVVRAEIMASFSLSTNLQESLRSKE

SEQ ID NO: 1522 - protein, 541 aa, synthetic construct
  REGION 1..541: note = Synthetic Sequence
DVVMTQTPLSLPVTLGNQASIFCRSSLGLVHRNGNTYLHWYLQKPGQSPKLLIYKVSHRFSGVPDRFSGSGSGTDFTLKISRVEAEDLGVYFCSQSTHVPWTFGGGTKLEIKGGGGSGGGGSGGGGSGGGGSQAYLQQSGAELVRPGASVKMSCKASGYTFTSHNLHWVKQTPRQGLQWIGAIYPGNGNTAYNQKFKGKATLTVDKSSSTAYMQLSSLTSDDSAVYFCARWGSVVGDWYFDVWGTGTTVTVSSSGGSGGSGGSGGSGGSGGSGGSGGSGGSGGSGGSGGSGGSGGSGGSGGSGGSGGSGGSGGSDKTHTCPPCPAPEAAGGPSVFLFPPKPKDTLMISRTPEVTCVVVDVSHEDPEVKFNWYVDGVEVHNAKTKPREEQYNSTYRVVSVLTVLHQDWLNGKEYKCQVSNKALPAPIEKTISKAKGQPREPQVCTLPPSRDELTKNQVSLSCAVKGFYPSDIAVEWESNGQPENNYKTTPPVLDSDGSFFLVSKLTVDKSRWQQGNVFSCSVMHEALHNHYTQKSLSLSPGK

SEQ ID NO: 1523 - protein, 452 aa, synthetic construct; identical to SEQ ID NO: 1479
  REGION 1..452: note = Synthetic Sequence

SEQ ID NO: 1524 - protein, 533 aa, synthetic construct
  REGION 1..533: note = Synthetic Sequence
QIVLSQSPAILSASPGEKVTMTCRASSSVSYIHWFQQKPGSSPKPWIYATSNLASGVPVRFSGSGSGTSYSLTISRVEAEDAATYYCQQWTSNPPTFGGGTKLEIKRGSTGGGGSGGGGSGGGGSQVQLQQPGAELVKPGASVKMSCKASGYTFTSYNMHWVKQTPGRGLEWIGAIYPGNGDTSYNQKFKGKATLTADKSSSTAYMQLSSLTSEDSAVYYCARSTYYGGDWYFNVWGAGTTVTVSSGGSGGSGGSGGSGGSGGSGGSGGSGGSGGSGGSGGSGGSGGSGGSGGSGGSGGSGGSGGSDKTHTCPPCPAPEAAGGPSVFLFPPKPKDTLMISRTPEVTCVVVDVSHEDPEVKFNWYVDGVEVHNAKTKPREEQYNSTYRVVSVLTVLHQDWLNGKEYKCQVSNKALPAPIEKTISKAKGQPREPQVCTLPPSRDELTKNQVSLSCAVKGFYPSDIAVEWESNGQPENNYKTTPPVLDSDGSFFLVSKLTVDKSRWQQGNVFSCSVMHEALHNHYTQKSLSLSPGK

SEQ ID NO: 1525 - protein, 452 aa, synthetic construct; identical to SEQ ID NO: 1479
  REGION 1..452: note = Synthetic Sequence

SEQ ID NO: 1526 - protein, 533 aa, synthetic construct; identical to SEQ ID NO: 1524
  REGION 1..533: note = Synthetic Sequence

SEQ ID NO: 1527 - protein, 759 aa, synthetic construct
  REGION 1..759: note = Synthetic Sequence
DKTHTCPPCPAPEAAGGPSVFLFPPKPKDTLMISRTPEVTCVVVDVSHEDPEVKFNWYVDGVEVHNAKTKPREEQYNSTYRVVSVLTVLHQDWLNGKEYKCQVSNKALPAPIEKTISKAKGQPREPQVYTLPPCRDELTKNQVSLWCLVKGFYPSDIAVEWESNGQPENNYKTTPPVLDSDGSFFLYSKLTVDKSRWQQGNVFSCSVMHEALHNHYTQKSLSLSPGKGGSGGSGGSGGSGGSGGSGGSGGSGGSGGSGGSGGSGGSGGSGGSGGSGGSGGSGGSGGSSSRTPSDKPVAHVVANPQAEGQLQWLNRRANALLANGVELRDNQLVVPSEGLYLIYSQVLFKGQGCPSTHVLLTHTISRIAVSFQTKVNLLSAIKSPCQRETPEGAEAKPWYEPIYLGGVFQLEKGDRLSAEINRPDYLDFAESGQVYFGIIALGGGGSSSRTPSDKPVAHVVANPQAEGQLQWLNRRANALLANGVELRDNQLVVPSEGLYLIYSQVLFKGQGCPSTHVLLTHTISRIAVSFQTKVNLLSAIKSPCQRETPEGAEAKPWYEPIYLGGVFQLEKGDRLSAEINRPDYLDFAESGQVYFGIIALGGGGSSSRTPSDKPVAHVVANPQAEGQLQWLNRRANALLANGVELRDNQLVVPSEGLYLIYSQVLFKGQGCPSTHVLLTHTISRIAVSFQTKVNLLSAIKSPCQRETPEGAEAKPWYEPIYLGGVFQLEKGDRLSAEINRPDYLDFAESGQVYFGIIAL

SEQ ID NO: 1528 - protein, 446 aa, synthetic construct
  REGION 1..446: note = Synthetic Sequence
TQDCSFQHSPISSDFAVKIRELSDYLLQDYPVTVASNLQDEELCGGLWRLVLAQRWMERLKTVAGSKMQGLLERVNTEIHFVTKCAFQPPPSCLRFVQTNISRLLQETSEQLVALKPWITRQNFSRCLELQCQPDSSTLPPPWSPRPLEATAPTAPQPSGGSGGSGGSGGSGGSGGSGGSGGSGGSGGSGGSGGSGGSGGSGGSGGSGGSGGSGGSGGSDKTHTCPPCPAPEAAGGPSVFLFPPKPKDTLMISRTPEVTCVVVDVSHEDPEVKFNWYVDGVEVHNAKTKPREEQYNSTYRVVSVLTVLHQDWLNGKEYKCQVSNKALPAPIEKTISKAKGQPREPQVCTLPPSRDELTKNQVSLSCAVKGFYPSDIAVEWESNGQPENNYKTTPPVLDSDGSFFLVSKLTVDKSRWQQGNVFSCSVMHEALHNHYTQKSLSLSPGK

SEQ ID NO: 1529 - protein, 452 aa, synthetic construct; identical to SEQ ID NO: 1479
  REGION 1..452: note = Synthetic Sequence

SEQ ID NO: 1530 - protein, 438 aa, synthetic construct
  REGION 1..438: note = Synthetic Sequence
PGWFLDSPDRPWNPPTFSPALLVVTEGDNATFTCSFSNTSESFVLNWYRMSPSNQTDKLAAFPEDRSQPGQDCRFRVTQLPNGRDFHMSVVRARRNDSGTYLCGAISLAPKAQIKESLRAELRVTERRAEVPTAHPSPSPRPAGQFQTLVSGGSGGSGGSGGSGGSGGSGGSGGSGGSGGSGGSGGSGGSGGSGGSGGSGGSGGSGGSGGSDKTHTCPPCPAPEAAGGPSVFLFPPKPKDTLMISRTPEVTCVVVDVSHEDPEVKFNWYVDGVEVHNAKTKPREEQYNSTYRVVSVLTVLHQDWLNGKEYKCQVSNKALPAPIEKTISKAKGQPREPQVCTLPPSRDELTKNQVSLSCAVKGFYPSDIAVEWESNGQPENNYKTTPPVLDSDGSFFLVSKLTVDKSRWQQGNVFSCSVMHEALHNHYTQKSLSLSPGK

SEQ ID NO: 1531 - protein, 452 aa, synthetic construct; identical to SEQ ID NO: 1479
  REGION 1..452: note = Synthetic Sequence

SEQ ID NO: 1532 - protein, 508 aa, synthetic construct
  REGION 1..508: note = Synthetic Sequence
FTVTVPKDLYVVEYGSNMTIECKFPVEKQLDLAALIVYWEMEDKNIIQFVHGEEDLKVQHSSYRQRARLLKDQLSLGNAALQITDVKLQDAGVYRCMISYGGADYKRITVKVNAPYNKINQRILVVDPVTSEHELTCQAEGYPKAEVIWTSSDHQVLSGKTTTTNSKREEKLFNVTSTLRINTTTNEIFYCTFRRLDPEENHTAELVIPELPLAHPPNERSGGSGGSGGSGGSGGSGGSGGSGGSGGSGGSGGSGGSGGSGGSGGSGGSGGSGGSGGSGGSDKTHTCPPCPAPEAAGGPSVFLFPPKPKDTLMISRTPEVTCVVVDVSHEDPEVKFNWYVDGVEVHNAKTKPREEQYNSTYRVVSVLTVLHQDWLNGKEYKCQVSNKALPAPIEKTISKAKGQPREPQVCTLPPSRDELTKNQVSLSCAVKGFYPSDIAVEWESNGQPENNYKTTPPVLDSDGSFFLVSKLTVDKSRWQQGNVFSCSVMHEALHNHYTQKSLSLSPGK

SEQ ID NO: 1533 - protein, 452 aa, synthetic construct; identical to SEQ ID NO: 1479
  REGION 1..452: note = Synthetic Sequence

SEQ ID NO: 1534 - protein, 438 aa, synthetic construct; identical to SEQ ID NO: 1530
  REGION 1..438: note = Synthetic Sequence

SEQ ID NO: 1535 - protein, 663 aa, synthetic construct
  REGION 1..663: note = Synthetic Sequence
PGWFLDSPDRPWNPPTFSPALLVVTEGDNATFTCSFSNTSESFVLNWYRMSPSNQTDKLAAFPEDRSQPGQDCRFRVTQLPNGRDFHMSVVRARRNDSGTYLCGAISLAPKAQIKESLRAELRVTERRAEVPTAHPSPSPRPAGQFQTLVSGGSGGSGGSGGSGGSGGSGGSGGSGGSGGSGGSGGSGGSGGSGGSGGSGGSGGSGGSGGSDKTHTCPPCPAPEAAGGPSVFLFPPKPKDTLMISRTPEVTCVVVDVSHEDPEVKFNWYVDGVEVHNAKTKPREEQYNSTYRVVSVLTVLHQDWLNGKEYKCQVSNKALPAPIEKTISKAKGQPREPQVYTLPPCRDELTKNQVSLWCLVKGFYPSDIAVEWESNGQPENNYKTTPPVLDSDGSFFLYSKLTVDKSRWQQGNVFSCSVMHEALHNHYTQKSLSLSPGKGGSGGSGGSGGSGGSGGSGGSGGSGGSGGSGGSGGSGGSGGSGGSGGSGGSGGSGGSGGSCDLPQTHSLGSRRTLMLLAQMRKISLFSCLKDRHDFGFPQEEFGNQFQKAETIPVLHEMIQQIFNLFSTKDSSAAWDETLLDKFYTELYQQLNDLEACVIQGVGVEETPLMKEDSILAVRKYFQRITLYLKEKKYSPCAWEVVRAEIMASFSLSTNLQESLRSKE

SEQ ID NO: 1536 - protein, 508 aa, synthetic construct; identical to SEQ ID NO: 1532
  REGION 1..508: note = Synthetic Sequence

SEQ ID NO: 1537 - protein, 733 aa, synthetic construct
  REGION 1..733: note = Synthetic Sequence
FTVTVPKDLYVVEYGSNMTIECKFPVEKQLDLAALIVYWEMEDKNIIQFVHGEEDLKVQHSSYRQRARLLKDQLSLGNAALQITDVKLQDAGVYRCMISYGGADYKRITVKVNAPYNKINQRILVVDPVTSEHELTCQAEGYPKAEVIWTSSDHQVLSGKTTTTNSKREEKLFNVTSTLRINTTTNEIFYCTFRRLDPEENHTAELVIPELPLAHPPNERSGGSGGSGGSGGSGGSGGSGGSGGSGGSGGSGGSGGSGGSGGSGGSGGSGGSGGSGGSGGSDKTHTCPPCPAPEAAGGPSVFLFPPKPKDTLMISRTPEVTCVVVDVSHEDPEVKFNWYVDGVEVHNAKTKPREEQYNSTYRVVSVLTVLHQDWLNGKEYKCQVSNKALPAPIEKTISKAKGQPREPQVYTLPPCRDELTKNQVSLWCLVKGFYPSDIAVEWESNGQPENNYKTTPPVLDSDGSFFLYSKLTVDKSRWQQGNVFSCSVMHEALHNHYTQKSLSLSPGKGGSGGSGGSGGSGGSGGSGGSGGSGGSGGSGGSGGSGGSGGSGGSGGSGGSGGSGGSGGSCDLPQTHSLGSRRTLMLLAQMRKISLFSCLKDRHDFGFPQEEFGNQFQKAETIPVLHEMIQQIFNLFSTKDSSAAWDETLLDKFYTELYQQLNDLEACVIQGVGVEETPLMKEDSILAVRKYFQRITLYLKEKKYSPCAWEVVRAEIMASFSLSTNLQESLRSKE

SEQ ID NO: 1538 - protein, 402 aa, synthetic construct; identical to SEQ ID NO: 1473
  REGION 1..402: note = Synthetic Sequence

SEQ ID NO: 1539 - protein, 452 aa, synthetic construct; identical to SEQ ID NO: 1472
  REGION 1..452: note = Synthetic Sequence

SEQ ID NO: 1540 - protein, 234 aa, synthetic construct
  REGION 1..234: note = Synthetic Sequence
DKTHTCPPCPAPEAAGGPSVFLFPPKPKDTLMISRTPEVTCVVVDVSHEDPEVKFNWYVDGVEVHNAKTKPREEQYNSTYRVVSVLTVLHQDWLNGKEYKCKVSNKALGAPIEKTISKAKGQPREPQVYTLPPSRDELTKNQVSLTCLVKGFYPSDIAVEWESNGQPENNYKTTPPVLDSDGSFFLTSKLTVDKSRWQQGNVFSCSVMHEALHNHYTQKSLSLSPGKSGCNGRC

SEQ ID NO: 1541 - protein, 459 aa, synthetic construct
  REGION 1..459: note = Synthetic Sequence
CDLPQTHSLGSRRTLMLLAQMRKISLFSCLKDRHDFGFPQEEFGNQFQKAETIPVLHEMIQQIFNLFSTKDSSAAWDETLLDKFYTELYQQLNDLEACVIQGVGVTETPLMKEDSILAVRKYFQRITLYLKEKKYSPCAWEVVRAEIMASFSLSTNLQESLRSKEGGSGGSGGSGGSGGSGGSGGSGGSGGSGGSGGSGGSGGSGGSGGSGGSGGSGGSGGSGGSDKTHTCPPCPAPEAAGGPSVFLFPPKPKDTLMISRTPEVTCVVVDVSHEDPEVKFNWYVDGVEVHNAKTKPREEQYNSTYRVVSVLTVLHQDWLNGKEYKCKVSNKALGAPIEKTISKAKGQPREPQVYTLPPSRDELTKNQVSLYCLVKGFYPSDIAVEWESNGQPENNYKTTPPVLDSDGSFFLYSKLTVDKSRWQQGNVFSCSVMHEALHNHYTQKSLSLSPGKSGCNGRC

SEQ ID NO: 1542 - protein, 405 aa, synthetic construct; identical to SEQ ID NO: 1499
  REGION 1..405: note = Synthetic Sequence

SEQ ID NO: 1543 - protein, 411 aa, synthetic construct; identical to SEQ ID NO: 1506
  REGION 1..411: note = Synthetic Sequence

SEQ ID NO: 1544 - protein, 414 aa, synthetic construct; identical to SEQ ID NO: 1497
  REGION 1..414: note = Synthetic Sequence

SEQ ID NO: 1545 - protein, 452 aa, synthetic construct; identical to SEQ ID NO: 1479
  REGION 1..452: note = Synthetic Sequence

SEQ ID NO: 1546 - protein, 452 aa, synthetic construct
  REGION 1..452: note = Synthetic Sequence
DKTHTCPPCPAPEAAGGPSVFLFPPKPKDTLMISRTPEVTCVVVDVSHEDPEVKFNWYVDGVEVHNAKTKPREEQYNSTYRVVSVLTVLHQDWLNGKEYKCQVSNKALPAPIEKTISKAKGQPREPQVYTLPPCRDELTKNQVSLWCLVKGFYPSDIAVEWESNGQPENNYKTTPPVLDSDGSFFLYSKLTVDKSRWQQGNVFSCSVMHEALHNHYTQKSLSLSPGKGGSGGSGGSGGSGGSGGSGGSGGSGGSGGSGGSGGSGGSGGSGGSGGSGGSGGSGGSGGSCDLPQTHSLGSRRTLMLLAQMRKISLFSCLKDRHDFGFPQEEFGNQFQKAETIPVLHEMIQQIFNLFSTKDSSAAWDETLLDKFYTELYQQLNDLEACVIQGVGVEETPLMKEDSILAVRKYFQRITLYLKEKKYSPCAWEVVRAEIMRSFSLSTNLQESLRSKE

SEQ ID NO: 1547 - protein, 402 aa, synthetic construct; identical to SEQ ID NO: 1480
  REGION 1..402: note = Synthetic Sequence

SEQ ID NO: 1548 - protein, 453 aa, synthetic construct
  REGION 1..453: note = Synthetic Sequence
DKTHTCPPCPAPEAAGGPSVFLFPPKPKDTLMISRTPEVTCVVVDVSHEDPEVKFNWYVDGVEVHNAKTKPREEQYNSTYRVVSVLTVLHQDWLNGKEYKCQVSNKALPAPIEKTISKAKGQPREPQVYTLPPCRDELTKNQVSLWCLVKGFYPSDIAVEWESNGQPENNYKTTPPVLDSDGSFFLYSKLTVDKSRWQQGNVFSCSVMHEALHNHYTQKSLSLSPGKGGSGGSGGSGGSGGSGGSGGSGGSGGSGGSGGSGGSGGSGGSGGSGGSGGSGGSGGSGGSCDLPETHSLDNRRTLMLLAQMSRISPSSCLMDRHDFGFPQEEFDGNQFQKAPAISVLHELIQQIFNLFTTKDSSAAWDEDLLDKFCTELYQQLNDLEACVMQEERVGETPLMNADSILAVKKYFRRITLYLTEKKYSPCAWEVVRAEIMRSLSLSTNLQERLRRKE

SEQ ID NO: 1549 - protein, 402 aa, synthetic construct; identical to SEQ ID NO: 1480
  REGION 1..402: note = Synthetic Sequence

SEQ ID NO: 1550 - protein, 453 aa, synthetic construct
  REGION 1..453: note = Synthetic Sequence
DKTHTCPPCPAPEAAGGPSVFLFPPKPKDTLMISRTPEVTCVVVDVSHEDPEVKFNWYVDGVEVHNAKTKPREEQYNSTYRVVSVLTVLHQDWLNGKEYKCQVSNKALPAPIEKTISKAKGQPREPQVYTLPPCRDELTKNQVSLWCLVKGFYPSDIAVEWESNGQPENNYKTTPPVLDSDGSFFLYSKLTVDKSRWQQGNVFSCSVMHEALHNHYTQKSLSLSPGKGGSGGSGGSGGSGGSGGSGGSGGSGGSGGSGGSGGSGGSGGSGGSGGSGGSGGSGGSGGSMSYNLLGFLQRSSNFQCQKLLGQLNGRLEYCLKDRMNFDIPEEIKQLQQFQKEDAALTIYEMLQNIFAIFRQDSSSTGWNETIVENLLANVYHQINHLKTVLEEKLEKEDFTRGKLMSSLHLKRYYGRILHYLKAKEYSHCAWTIVRVEILRNFYFINRLTGYLRN

SEQ ID NO: 1551 - protein, 411 aa, synthetic construct; identical to SEQ ID NO: 1506
  REGION 1..411: note = Synthetic Sequence

SEQ ID NO: 1552 - protein, 440 aa, synthetic construct
  REGION 1..440: note = Synthetic Sequence
DKTHTCPPCPAPEAAGGPSVFLFPPKPKDTLMISRTPEVTCVVVDVSHEDPEVKFNWYVDGVEVHNAKTKPREEQYNSTYRVVSVLTVLHQDWLNGKEYKCQVSNKALPAPIEKTISKAKGQPREPQVYTLPPCRDELTKNQVSLWCLVKGFYPSDIAVEWESNGQPENNYKTTPPVLDSDGSFFLYSKLTVDKSRWQQGNVFSCSVMHEALHNHYTQKSLSLSPGKGGSGGSGGSGGSGGSGGSGGSGGSGGSGGSGGSGGSGGSGGSGGSGGSGGSGGSGGSGGSAPVRSLNCTLRDSQQKSLVMSGPYELKALHLGGQDMEQQVVFSMSFVQGEESNDKIPVALGLKEKNLYLSCVLKDDKPTLQLESVDPKNYPKKKMEKRFVFNKIEINNKLEFESAQFPNWYISTSQAENMPVFLGGTKGGQDITDFTMQFVSS

SEQ ID NO: 1553 - protein, 405 aa, synthetic construct; identical to SEQ ID NO: 1499
  REGION 1..405: note = Synthetic Sequence

SEQ ID NO: 1554 - protein, 759 aa, synthetic construct; identical to SEQ ID NO: 1527
  REGION 1..759: note = Synthetic Sequence

SEQ ID NO: 1555 - protein, 440 aa, synthetic construct
  REGION 1..440: note = Synthetic Sequence
DKTHTCPPCPAPEAAGGPSVFLFPPKPKDTLMISRTPEVTCVVVDVSHEDPEVKFNWYVDGVEVHNAKTKPREEQYNSTYRVVSVLTVLHQDWLNGKEYKCQVSNKALPAPIEKTISKAKGQPREPQVCTLPPSRDELTKNQVSLSCAVKGFYPSDIAVEWESNGQPENNYKTTPPVLDSDGSFFLVSKLTVDKSRWQQGNVFSCSVMHEALHNHYTQKSLSLSPGKGGSGGSGGSGGSGGSGGSGGSGGSGGSGGSGGSGGSGGSGGSGGSGGSGGSGGSGGSGGSAPVRSLNCTLRDSQQKSLVMSGPYELKALHLGGQDMEQQVVFSMSFVQGEESNDKIPVALGLKEKNLYLSCVLKDDKPTLQLESVDPKNYPKKKMEKRFVFNKIEINNKLEFESAQFPNWYISTSQAENMPVFLGGTKGGQDITDFTMQFVSS

SEQ ID NO: 1556 - protein, 632 aa, synthetic construct; identical to SEQ ID NO: 1521
  REGION 1..632: note = Synthetic Sequence

SEQ ID NO: 1557 - protein, 402 aa, synthetic construct; identical to SEQ ID NO: 1480
  REGION 1..402: note = Synthetic Sequence

SEQ ID NO: 1558 - protein, 452 aa, synthetic construct; identical to SEQ ID NO: 1479
  REGION 1..452: note = Synthetic Sequence

SEQ ID NO: 1559 - protein, 403 aa, synthetic construct
  REGION 1..403: note = Synthetic Sequence
SQVQLVESGGGLVHPGGSLRLSCAASGSFSSINVMGWYRQAPGKERELVARITNLGLPNYADSVTGRFTISRDNAKNTVYLQMNSLKPEDTAVYYCYLVALKAEYWGQGTQVTVSSGGSGGSGGSGGSGGSGGSGGSGGSGGSGGSGGSGGSGGSGGSGGSGGSGGSGGSGGSGGSDKTHTCPPCPAPEFLGGPSVFLFPPKPKDTLMISRTPEVTCVVVDVSQEDPEVQFNWYVDGVEVHNAKTKPREEQFNSTYRVVSVLTVLHQDWLNGKEYKCKVSNKGLPSSIEKTISKAKGQPREPQVYTLPPSQEEMTKNQVSLSCAVKGFYPSDIAVEWESNGQPENNYKTTPPVLDSDGSFFLVSRLTVDKSRWQEGNVFSCSVMHEALHNHYTQKSLSLSLGK

SEQ ID NO: 1560 - protein, 452 aa, synthetic construct
  REGION 1..452: note = Synthetic Sequence
DKTHTCPPCPAPEFLGGPSVFLFPPKPKDTLMISRTPEVTCVVVDVSQEDPEVQFNWYVDGVEVHNAKTKPREEQFNSTYRVVSVLTVLHQDWLNGKEYKCKVSNKGLPSSIEKTISKAKGQPREPQVYTLPPSQEEMTKNQVSLWCLVKGFYPSDIAVEWESNGQPENNYKTTPPVLDSDGSFFLYSRLTVDKSRWQEGNVFSCSVMHEALHNHYTQKSLSLSLGKGGSGGSGGSGGSGGSGGSGGSGGSGGSGGSGGSGGSGGSGGSGGSGGSGGSGGSGGSGGSCDLPQTHSLGSRRTLMLLAQMRKISLFSCLKDRHDFGFPQEEFGNQFQKAETIPVLHEMIQQIFNLFSTKDSSAAWDETLLDKFYTELYQQLNDLEACVIQGVGVEETPLMKEDSILAVRKYFQRITLYLKEKKYSPCAWEVVRAEIMASFSLSTNLQESLRSKE

SEQ ID NO: 1561 - protein, 353 aa, synthetic construct
  REGION 1..353: note = Synthetic Sequence
QVQLQESGGGLVQPGGSLRLSCAASGRIFSVNAMGWYRQAPGKQRELVAAITNQGAPTYADSVKGRFTISRDNAGNTVYLQMNSLRPEDTAVYYCKAFTRGDDYWGQGTQVTVSSVDGGSGGSGGSGGSGGSGGSRSGGSGGSGGSGGSGGSGGSGGSGGSGGSGGSGGSGGSGGSAAAMCDLPQTHSLGSRRTLMLLAQMRRISLFSCLKDRHDFGFPQEEFGNQFQKAETIPVLHEMIQQIFNLFSTKDSSAAWDETLLDKFYTELYQQLNDLEACVIQGVGVTETPLMKEDSILAVRKYFQRITLYLKEKKYSPCAWEVVRAEIMASFSLSTNLQESLRSKELEHHHHHH

SEQ ID NO: 1562 - protein, 166 aa, synthetic construct
  REGION 1..166: note = Synthetic Sequence (wild-type IFNalpha1)
CDLPETHSLDNRRTLMLLAQMSRISPSSCLMDRHDFGFPQEEFDGNQFQKAPAISVLHELIQQIFNLFTTKDSSAAWDEDLLDKFCTELYQQLNDLEACVMQEERVGETPLMNADSILAVKKYFRRITLYLTEKKYSPCAWEVVRAEIMRSLSLSTNLQERLRRKE

SEQ ID NO: 1563 - protein, 166 aa, synthetic construct
  REGION 1..166: note = Synthetic Sequence (IFN-gamma)
MKYTSYILAFQLCIVLGSLGCYCQDPYVKEAENLKKYFNAGHSDVADNGTLFLGILKNWKEESDRKIMQSQIVSFYFKLFKNFKDDQSIQKSVETIKEDMNVKFFNSNKKKRDDFEKLTNYSVTDLNVQRKAIHELIQVMAELSPAAKTGKRKRSQMLFRGRRASQ

SEQ ID NO: 1564 - protein, 114 aa, synthetic construct
  REGION 1..114: note = Synthetic Sequence (wild type IL-15)
NWVNVISDLKKIEDLIQSMHIDATLYTESDVHPSCKVTAMKCFLLELQVISLESGDASIHDTVENLIILANNSLSSNGNVTESGCKECEELEEKNIKEFLQSFVHIVQMFINTS

SEQ ID NO: 1565 - protein, 227 aa, synthetic construct
  REGION 1..227: note = Synthetic Sequence (hIgG1 Fc_L234A_L235A_P329G_Y407T)
DKTHTCPPCPAPEAAGGPSVFLFPPKPKDTLMISRTPEVTCVVVDVSHEDPEVKFNWYVDGVEVHNAKTKPREEQYNSTYRVVSVLTVLHQDWLNGKEYKCKVSNKALPAPIEKTISKAKGQPREPQVYTLPPSRDELTKNQVSLTCLVKGFYPSDIAVEWESNGQPENNYKTTPPVLDSDGSFFLTSKLTVDKSRWQQGNVFSCSVMHEALHNHYTQKSLSLSPGK

SEQ ID NO: 1566 - protein, 227 aa, synthetic construct
  REGION 1..227: note = Synthetic Sequence (hIgG1 Fc_L234A_L235A_P329G_T366Y)
DKTHTCPPCPAPEAAGGPSVFLFPPKPKDTLMISRTPEVTCVVVDVSHEDPEVKFNWYVDGVEVHNAKTKPREEQYNSTYRVVSVLTVLHQDWLNGKEYKCKVSNKALPAPIEKTISKAKGQPREPQVYTLPPSRDELTKNQVSLYCLVKGFYPSDIAVEWESNGQPENNYKTTPPVLDSDGSFFLYSKLTVDKSRWQQGNVFSCSVMHEALHNHYTQKSLSLSPGK

SEQ ID NO: 1567 - protein, 227 aa, synthetic construct
  REGION 1..227: note = Synthetic Sequence (hIgG1Fc_L234A_L235A_K322Q_Y349C_T366S_L368A_Y407V)
DKTHTCPPCPAPEAAGGPSVFLFPPKPKDTLMISRTPEVTCVVVDVSHEDPEVKFNWYVDGVEVHNAKTKPREEQYNSTYRVVSVLTVLHQDWLNGKEYKCKVSNKALPAPIEKTISKAKGQPREPQVCTLPPSRDELTKNQVSLSCAVKGFYPSDIAVEWESNGQPENNYKTTPPVLDSDGSFFLVSKLTVDKSRWQQGNVFSCSVMHEALHNHYTQKSLSLSPGK

SEQ ID NO: 1568 - protein, 227 aa, synthetic construct
  REGION 1..227: note = Synthetic Sequence (hIgG1 Fc_L234A_L235A_K322Q_S354C_T366W)
DKTHTCPPCPAPEAAGGPSVFLFPPKPKDTLMISRTPEVTCVVVDVSHEDPEVKFNWYVDGVEVHNAKTKPREEQYNSTYRVVSVLTVLHQDWLNGKEYKCKVSNKALPAPIEKTISKAKGQPREPQVYTLPPCRDELTKNQVSLWCLVKGFYPSDIAVEWESNGQPENNYKTTPPVLDSDGSFFLYSKLTVDKSRWQQGNVFSCSVMHEALHNHYTQKSLSLSPGK

SEQ ID NO: 1569 - protein, 115 aa, synthetic construct
  REGION 1..115: note = Synthetic Sequence (R1CHCL50_opt4)
DVQLVESGGGLVQPGGSLRLSCAASGSFSSINVMGWYRQAPGKERELVARITNLGLPNYADSVKGRFTISRDNSKNTVYLQMNSLRPEDTAVYYCYLVALKAEYWGQGTLVTVSS

SEQ ID NO: 1570 - protein, 115 aa, synthetic construct
  REGION 1..115: note = Synthetic Sequence (3LEC89_opt4)
DVQLVESGGGLVQPGGSLRLSCAASGRIFSVNAMGWYRQAPGKQRELVAAITNQGAPTYADSVKGRFTISRDNSKNTVYLQMNSLRPEDTAVYYCKAFTRGDDYWGQGTLVTVSS

SEQ ID NO: 1571 - protein, 235 aa, synthetic construct
  REGION 1..235: note = Synthetic Sequence (Flt3L full length)
MTVLAPAWSPTTYLLLLLLLSSGLSGTQDCSFQHSPISSDFAVKIRELSDYLLQDYPVTVASNLQDEELCGGLWRLVLAQRWMERLKTVAGSKMQGLLERVNTEIHFVTKCAFQPPPSCLRFVQTNISRLLQETSEQLVALKPWITRQNFSRCLELQCQPDSSTLPPPWSPRPLEATAPTAPQPPLLLLLLLPVGLLLLAAAWCLHWQRTRRRTPRPGEQVPPVPSPQDLLLVEH

SEQ ID NO: 1572 - protein, 159 aa, synthetic construct
  REGION 1..159: note = Synthetic Sequence (mature Flt3L ec)
TQDCSFQHSPISSDFAVKIRELSDYLLQDYPVTVASNLQDEELCGGLWRLVLAQRWMERLKTVAGSKMQGLLERVNTEIHFVTKCAFQPPPSCLRFVQTNISRLLQETSEQLVALKPWITRQNFSRCLELQCQPDSSTLPPPWSPRPLEATAPTAPQPP

SEQ ID NO: 1573 - protein, 155 aa, synthetic construct
  REGION 1..155: note = Synthetic Sequence (mature Flt3L ec)
TQDCSFQHSPISSDFAVKIRELSDYLLQDYPVTVASNLQDEELCGGLWRLVLAQRWMERLKTVAGSKMQGLLERVNTEIHFVTKCAFQPPPSCLRFVQTNISRLLQETSEQLVALKPWITRQNFSRCLELQCQPDSSTLPPPWSPRPLEATAPTA

SEQ ID NO: 1574 - protein, 134 aa, synthetic construct
  REGION 1..134: note = Synthetic Sequence (mature Flt3L ec)
TQDCSFQHSPISSDFAVKIRELSDYLLQDYPVTVASNLQDEELCGGLWRLVLAQRWMERLKTVAGSKMQGLLERVNTEIHFVTKCAFQPPPSCLRFVQTNISRLLQETSEQLVALKPWITRQNFSRCLELQCQP

SEQ ID NO: 1575 - protein, 129 aa, synthetic construct
  REGION 1..129: note = Synthetic Sequence (mature Flt3L ec)
CSFQHSPISSDFAVKIRELSDYLLQDYPVTVASNLQDEELCGGLWRLVLAQRWMERLKTVAGSKMQGLLERVNTEIHFVTKCAFQPPPSCLRFVQTNISRLLQETSEQLVALKPWITRQNFSRCLELQC

SEQ ID NO: 1576 - protein, 587 aa, synthetic construct
  REGION 1..587: note = Synthetic Sequence
QLQESGGGLVHPGGSLRLSCAASGSFSSINVMGWYRQAPGKERELVARITNLGLPNYADSVTGRFTISRDNAKNTVYLQMNSLKPEDTAVYYCYLVALKAEYWGQGTQVTVSSGGSGGSGGSGGSGGSGGSGGSGGSGGSGGSGGSGGSGGSGGSGGSGGSGGSGGSGGSGGSDKTHTCPPCPAPEAAGGPSVFLFPPKPKDTLMISRTPEVTCVVVDVSHEDPEVKFNWYVDGVEVHNAKTKPREEQYNSTYRVVSVLTVLHQDWLNGKEYKCQVSNKALPAPIEKTISKAKGQPREPQVCTLPPSRDELTKNQVSLSCAVKGFYPSDIAVEWESNGQPENNYKTTPPVLDSDGSFFLVSKLTVDKSRWQQGNVFSCSVMHEALHNHYTQKSLSLSPGKGGSGGSGGSGGSGGSGGSGGSGGSGGSGGSGGSGGSGGSGGSGGSGGSGGSGGSGGSGGSQDPYVKEAENLKKYFNAGHSDVADNGTLFLGILKNWKEESDRKIMQSQIVSFYFKLFKNFKDDQSIQKSVETIKEDMNVKFFNSNKKKRDDFEKLTNYSVTDLNVQRKAIHELIQVMAELSPAAKTG

SEQ ID NO: 1577 - protein, 414 aa, synthetic construct
  REGION 1..414: note = Synthetic Sequence
DKTHTCPPCPAPEAAGGPSVFLFPPKPKDTLMISRTPEVTCVVVDVSHEDPEVKFNWYVDGVEVHNAKTKPREEQYNSTYRVVSVLTVLHQDWLNGKEYKCQVSNKALPAPIEKTISKAKGQPREPQVYTLPPCRDELTKNQVSLWCLVKGFYPSDIAVEWESNGQPENNYKTTPPVLDSDGSFFLYSKLTVDKSRWQQGNVFSCSVMHEALHNHYTQKSLSLSPGKGGSGGSGGSGGSGGSGGSGGSGGSGGSGGSGGSGGSGGSGGSGGSGGSGGSGGSGGSGGSQDPYVKEAENLKKYFNAGHSDVADNGTLFLGILKNWKEESDRKIMQSQIVSFYFKLFKNFKDDQSIQKSVETIKEDMNVKFFNSNKKKRDDFEKLTNYSVTDLNVQRKAIHELIQVMAELSPAAKTG

SEQ ID NO: 1578 - protein, 405 aa, synthetic construct; identical to SEQ ID NO: 1499
  REGION 1..405: note = Synthetic Sequence

SEQ ID NO: 1579 - protein, 759 aa, synthetic construct; identical to SEQ ID NO: 1527
  REGION 1..759: note = Synthetic Sequence

SEQ ID NO: 1580 - protein, 619 aa, synthetic construct
  REGION 1..619: note = Synthetic Sequence
QVQLQESGGGLAQAGGSLRLSCAASGRTFSMGWFRQAPGKEREFVAAITYSGGSPYYASSVRGRFTISRDNAKNTVYLQMNSLKPEDTAVYYCAANPTYGSDWNAENWGQGTQVTVSSGGSGGSGGSGGSGGSGGSGGSGGSGGSGGSGGSGGSGGSGGSGGSGGSGGSGGSGGSGGSDKTHTCPPCPAPEAAGGPSVFLFPPKPKDTLMISRTPEVTCVVVDVSHEDPEVKFNWYVDGVEVHNAKTKPREEQYNSTYRVVSVLTVLHQDWLNGKEYKCQVSNKALPAPIEKTISKAKGQPREPQVCTLPPSRDELTKNQVSLSCAVKGFYPSDIAVEWESNGQPENNYKTTPPVLDSDGSFFLVSKLTVDKSRWQQGNVFSCSVMHEALHNHYTQKSLSLSPGKGGSGGSGGSGGSGGSGGSGGSGGSGGSGGSGGSGGSGGSGGSGGSGGSGGSGGSGGSGGSSSRTPSDKPVAHVVANPQAEGQLQWLNRRANALLANGVELRDNQLVVPSEGLYLIYSQVLFKGQGCPSTHVLLTHTISRIAVSFQTKVNLLSAIKSPCQRETPEGAEAKPWYEPIYLGGVFQLEKGDRLSAEINRPDYLDFAESGQVYFGIIAL

SEQ ID NO: 1581 - protein, 600 aa, synthetic construct
  REGION 1..600: note = Synthetic Sequence
DKTHTCPPCPAPEAAGGPSVFLFPPKPKDTLMISRTPEVTCVVVDVSHEDPEVKFNWYVDGVEVHNAKTKPREEQYNSTYRVVSVLTVLHQDWLNGKEYKCQVSNKALPAPIEKTISKAKGQPREPQVYTLPPCRDELTKNQVSLWCLVKGFYPSDIAVEWESNGQPENNYKTTPPVLDSDGSFFLYSKLTVDKSRWQQGNVFSCSVMHEALHNHYTQKSLSLSPGKGGSGGSGGSGGSGGSGGSGGSGGSGGSGGSGGSGGSGGSGGSGGSGGSGGSGGSGGSGGSSSRTPSDKPVAHVVANPQAEGQLQWLNRRANALLANGVELRDNQLVVPSEGLYLIYSQVLFKGQGCPSTHVLLTHTISRIAVSFQTKVNLLSAIKSPCQRETPEGAEAKPWYEPIYLGGVFQLEKGDRLSAEINRPDYLDFAESGQVYFGIIALGGGGSSSRTPSDKPVAHVVANPQAEGQLQWLNRRANALLANGVELRDNQLVVPSEGLYLIYSQVLFKGQGCPSTHVLLTHTISRIAVSFQTKVNLLSAIKSPCQRETPEGAEAKPWYEPIYLGGVFQLEKGDRLSAEINRPDYLDFAESGQVYFGIIAL
